(19) United States
(12) Patent Application Publication
(10) Pub. No.: US 2024/0110166 A1
(43) Pub. Date: Apr. 4, 2024

(54) EDITING OF CCR5 RECEPTOR GENE TO PROTECT AGAINST HIV INFECTION

(71) Applicant: President and Fellows of Harvard College, Cambridge, MA (US)

(72) Inventors: Juan Pablo Maianti, Cambridge, MA (US); David R. Liu, Cambridge, MA (US)

(73) Assignee: President and Fellows of Harvard College, Cambridge, MA (US)

(21) Appl. No.: 18/484,381

(22) Filed: Oct. 10, 2023

Related U.S. Application Data
(63) Continuation of application No. 16/926,436, filed on Jul. 10, 2020, now Pat. No. 11,820,969.
Application No. 16/926,436 is a division of application No. 15/852,891, filed on Dec. 22, 2017, now Pat. No. 10,745,677.
(60) Provisional application No. 62/438,827, filed on Dec. 23, 2016.

(51) Int. Cl. C12N 9/22; A61P 31/18; C07K 14/715; C12N 9/78; C12N 15/10; C12N 15/113

(52) U.S. Cl. CPC C12N 9/22; A61P 31/18; C07K 14/7158; C12N 9/78; C12N 15/102; C12N 15/1138; C12Y 305/04001; C07K 2319/80; C12N 2310/20; C12N 2740/16062; C12Y 301/21

(57) ABSTRACT

Provided herein are systems, compositions, and methods of introducing protective and/or loss-of-function variants of CCR5 and CCR2. Variants may be introduced using a CRISPR/Cas9-based nucleobase editor or other guide nucleotide sequence-programmable DNA binding protein domain-based fusion protein described herein. Further provided herein are compositions and methods of preventing and treating conditions related to HIV infection and progression as well as to AIDS.

### RELATED APPLICATIONS

[0001] This application claims priority under 35 U.S.C. § 119(e) to U.S. provisional patent application. U.S. Ser. No. 62/438,827, filed Dec. 23, 2016, which is incorporated herein by reference.

### GOVERNMENT SUPPORT

[0002] This invention was made with government support under grant number GM065865, awarded by the National Institutes of Health (NIH). The government has certain rights in the invention.

### BACKGROUND

[0003] C-C chemokine receptor type 5 (also commonly known as CCR5 or CD195) is a protein found on the surface of white blood cells. CCR5 acts as a receptor for chemokines and has demonstrated involvement in several different disease states including, but not limited to, human immunodeficiency virus (HIV) and acquired immune deficiency syndrome (AIDS). Many strains of HIV, the virus that causes AIDS, initially use CCR5 to enter and infect host cells. A mutation known as CCR5-Δ32 in the CCR5 gene has been shown to protect those individuals that carry it against these strains of HIV. Loss-of-function CCR5 mutants have generated significant interest in the biotech and pharmaceutical industries in light of the widespread and devastating effects of HIV/AIDS (“HIV/AIDS Fact sheet Updated July 2016” from the World Health Organization). However, existing methods and technologies for creating CCR5 loss-of-function mutants in vivo have been ineffective due to the large number of cells that need to be modified. Other concerns involve off-target effects, genome instability, or oncogenic modifications that may be caused by genome-editing treatments.

### SUMMARY

[0004] Provided herein are systems, compositions, kits, and methods for modifying a polynucleotide (e.g. DNA) encoding a CCR5 protein to produce a loss-of-function CCR5 variant. Also provided are systems, compositions, kits, and methods for modifying a polynucleotide encoding a CCR2 protein to produce loss-of-function CCR2 mutants. The methodology relies on CRISPR/Cas9-based base-editing technology. The precise targeting methods described herein are superior to previously proposed strategies that create random indels in the CCR5 or CCR2 genomic locus using engineered nucleases. The methods also have a more favorable safety profile, due to low probability of off-target effects. Thus, the base editing methods described herein have a low impact on genomic stability, including oncogene activation or tumor suppressor inactivation. The loss-of-function CCR5 and/or CCR2 variants generated have a protective function against HIV infection (including prevention of HIV infection), decrease one or more sympotoms of HIV infection, halt or delay progression of HIV to AIDS, and/or decrease one or more sympotoms of AIDS.

[0005] Some aspects of the present disclosure provide a method of editing a polynucleotide encoding a C-C chemokine receptor type five (CCR5) protein, the method comprising contacting the CCR5-encoding polynucleotide with: (i) a fusion protein comprising: (a) a guide nucleotide sequence-programmable DNA binding protein domain; and (b) a cytosine deaminase domain; and (ii) a guide nucleotide sequence targeting the fusion protein of (i) to a target cytosine (C) base in the CCR5-encoding polynucleotide; wherein the contacting results in deamination of the the target C base is by the fusion protein, resulting in a cytosine-guanine pair (C:G) to thymine-adenine pair (T:A) change in the CCR5-encoding polynucleotide. This may occur in any manner, and is not bound by any particular theory.

[0006] In one embodiment, the guide nucleotide sequence-programmable DNA binding protein domain is selected from the group consisting of: a nuclease inactive Cas9 (dCas9) domain, a nuclease inactive Cpf1 domain, a nuclease inactive Argonaute domain, and variants and combinations thereof. As a set of non limiting examples, any of the fusion proteins described herein that include a Cas9 domain, can use another guide nucleotide sequence-programmable DNA binding protein, such as CasX, CasY, Cpf1, C2c1, C2c2, C2c3, and Argonaute, in place of the Cas9 domain. Guide nucleotide sequence-programmable DNA binding protein include, without limitation, Cas9 (e.g., dCas9 and nCas9), CasX, CasY. Cpf1, C2c1, C2c2, C2C3, Argonaute, and any of suitable protein described herein.

[0007] In another embodiment, the guide nucleotide sequence-programmable DNA-binding protein domain comprises a nuclease inactive Cas9 (dCas9) domain. In some embodiments, the amino acid sequence of the dCas9 domain comprises mutations corresponding to D10A and/or H840A mutation(s) in SEQ ID NO: 1. In another embodiment, the amino acid sequence of the dCas9 domain comprises a mutation corresponding to a D10A mutation in SEQ ID NO: 1, and wherein the dCas9 domain comprises a histidine at the position corresponding to amino acid 840 of SEQ ID NO: 1.

[0008] In certain embodiments, the guide nucleotide sequence-programmable DNA-binding protein domain comprises a nuclease inactive Cpf1 (dCpf1) domain. In some embodiments, the dCpf1 domain is from a species of Acidaminococcus or Lachnospiraceae. In an embodiment, the guide nucleotide sequence-programmable DNA-binding protein domain comprises a nuclease inactive Argonaute (dAgo) domain. In a further embodiment, the dAgo domain is from Natronobacterium gregoryi.

[0009] As a set of non limiting examples, any of the fusion proteins described herein that include a Cas9 domain can use another guide nucleotide sequence-programmable DNA binding protein, such as CasX, CasY, Cpf1, C2c1, C2c2, C2c3, and Argonaute, in place of the Cas9 domain. These may be nuclease inactive variants of the proteins. Guide nucleotide sequence-programmable DNA binding protein include, without limitation, Cas9 (e.g., dCas9 and nCas9), saCas9 (e.g., saCas9d, saCas9n, saKKH Cas9), CasX, CasY, Cpf1, C2c1, C2c2, C2C3, Argonaute, and any of suitable protein described herein. In some embodiments, the fusion protein described herein comprises a Gam protein, a guide nucleotide sequence-programmable DNA binding protein, and a cytidine deaminase domain.

[0010] In some embodiments, the cytosine deaminase domain comprises an apolipoprotein B mRNA-editing complex (APOBEC) family deaminase. In an embodiment, the cytosine deaminase is selected from the group consisting of APOBEC1, APOBEC2, APOBEC3A, APOBEC3B, APOBEC3C, APOBEC3D, APOBEC3F, APOBEC3G deaminase. APOBEC3H deaminase, APOBEC4 deaminase, activation-induced deaminase (AID), and pmCDA1. In an embodiment, the cytosine deaminase comprises an amino acid sequence of any one of SEQ ID NOs: 270-292.

[0011] In some embodiments, the fusion protein of (a) further comprises a uracil glycosylase inhibitor (UGI) domain. In certain embodiments, the cytosine deaminase domain is fused to the N-terminus of the guide nucleotide sequence-programmable DNA-binding protein domain. In an embodiment, the UGI domain is fused to the C-terminus of the guide nucleotide sequence-programmable DNA-binding protein domain.

[0012] In some embodiments, the cytosine deaminase and the guide nucleotide sequence-programmable DNA-binding protein domain are fused via an optional linker. In another embodiment, the UGI domain is fused to the dCas9 domain via an optional linker.

[0013] In certain embodiments, the fusion protein comprises the structure NH₂-[cytosine deaminase domain]-[optional linker sequence]-[guide nucleotide sequence-programmable DNA-binding protein domain]-[optional linker sequence]-[UGI domain]-COOH.

[0014] In some embodiments, the linker comprises (GGGS)ₙ (SEQ ID NO: 303), (GGGGS)ₙ (SEQ ID NO: 304), (G)ₙ, (EAAAK)ₙ (SEQ ID NO: 305), (GGS)ₙ, SGSETPGTSESATPES (SEQ ID NO: 306), or (XP)ₙ motif, or a combination of any of these, wherein n is independently an integer between 1 and 30, and wherein X is any amino acid. In an embodiment, the linker comprises the amino acid sequence SGSETPGTSESATPES (SEQ ID NO: 306). In another embodiment, the linker is (GGS)ₙ, and wherein n is 1, 3, or 7.

[0015] In certain embodiments, the fusion protein comprises the amino acid sequence of any one of SEQ ID NO: 293-302.

[0016] In an embodiment, the polynucleotide encoding the CCR5 protein comprises a coding strand and a complementary strand. In some embodiments, the polynucleotide encoding the CCR5 protein comprises a coding region and a non-coding region. In an embodiment, the C to T change occurs in the coding sequence of the CCR5-encoding polynucleotide. In some embodiments, the C to T change leads to a mutation in the CCR5 protein.

[0017] In some embodiments, the mutation in the CCR5 protein is a loss-of-function mutation. In certain embodiments, the mutation is selected from the mutations listed in Tables 1-10. In one embodiment, the guide nucleotide sequence is selected from the guide nucleotide sequences listed in Tables 3-5 and 8-10. In certain embodiments, the loss-of-function mutation introduces a premature stop codon in the CCR5 coding sequence that leads to a truncated or non-functional CCR5 protein. In certain embodiments, the premature stop codon is TAG (Amber), TGA (Opal), or TAA (Ochre).

[0018] In some embodiments, the premature stop codon is generated from a CAG to TAG change via the deamination of the first C on the coding strand. In certain embodiments, the premature stop codon is generated from a CGA to TGA change via the deamination of the first C on the coding strand. In an embodiment, the premature stop codon is generated from a CAA to TAA change via the deamination of the first C on the coding strand. In certain embodiments, the premature stop codon is generated from a TGG to TAG change via the deamination of the second C on the complementary strand. In an embodiment, the premature stop codon is generated from a TGG to TGA change via the deamination of the third C on the complementary strand. In an embodiment, the premature stop codon is generated from a TGG to TAA change via the deamination of the second C and third C on the complementary strand. In another embodiment, the premature stop codon is generated from a CGG to TAG or CGA to TAA change via the deamination of C on the coding strand and the deamination of C on the complementary strand.

[0019] In some embodiments, the guide nucleotide sequence is selected from the guide nucleotide sequences (SEQ ID NO: 381-657) listed in Table 3, Table 4, Table 5. Table 8, or Table 9. In certain embodiments, tandem premature stop codons are introduced. In one embodiment, the mutation is selected from the group consisting of: Q186X/Q188X, Q277X/Q288X, Q328X/Q329X, Q329X/R334X, or R341X/Q346X. In certain embodiments, the guide nucleotide sequence is selected from the group consisting of: SEQ ID NOs: 381-657. In some embodiments, two guide nucleotides are selected from SEQ ID NOs: 381-657. In some embodiments, three or more guide nucleotides are selected from SEQ ID NOs: 381-657.

[0020] In some embodiments, the loss-of-function mutation destabilizes CCR5 protein folding. In certain embodiments, the loss-of-function mutation is selected from the mutations listed in Tables 1-9. In specific embodiments, the guide nucleotide sequence is selected from the guide nucleotide sequences listed in Tables 3-5 and 8-9 (SEQ ID NO: 381-657).

[0021] In some embodiments, the C to T change modifies a splicing site in the non-coding region of the CCR5-encoding polynucleotide. In one embodiment, the C to T change modifies at an intron-exon junction. In another embodiment, the C to T change modifies a splicing donor site. In another embodiment, the C to T change modifies a splicing acceptor site. In certain embodiments, the C to T changes occurs at a C base-paired with the G base in a start codon (AUG). In some embodiments, the C to T change prevents CCR5 mRNA maturation or abrogates CCR5 expression.

[0022] In some embodiments, the C to T change is selected from the C to T changes listed in Table 2, 8, or 9. In certain embodiments, the guide nucleotide sequence is selected from the guide nucleotide sequences (SEQ ID NOs: 577-657) listed in Tables 8 and 9.

[0023] In some embodiments, the C to T change results in a codon change in the CCR5-encoding polynucleotide listed in Table 7. In certain embodiments, a PAM sequence is located 3′ of the C being changed. In certain embodiments, a PAM sequence is located 5′ of the C being changed. In specific embodiments, the PAM sequence is selected from the group consisting of: NGG, NGAN, NGNG, NGAG, NGCG, NNGRRT, NGRRN, NNNRRT, NNNGATT, NNAGAA, NAAAC, NNT, NNNT, and YNT, wherein Y is pyrimidine, R is purine, and N is any nucleobase.

[0024] In some embodiments, no PAM sequence is located 3′ of the C being changed. In some embodiments, no PAM sequence is located 5′ of the C being changed. In certain embodiments, no PAM sequence is located 5′ or 3′ of the C being changed. In some embodiments, at least 1, 2, 3, 4, 5, 6, 7, 8, 9, or 10 mutations are introduced into the CCR5-encoding polynucleotide. In certain embodiments, the guide nucleotide sequence is RNA (guide RNA or gRNA). In some embodiments, the guide nucleotide sequence is ssDNA (guide DNA or gDNA).

[0025] In some aspects, the disclosure provides a method of editing a polynucleotide encoding a C-C chemokine receptor type 2 (CCR2) protein, the method comprising contacting the CCR2-encoding polynucleotide with: (i) a fusion protein comprising: (a) a guide nucleotide sequence-programmable DNA binding protein domain; and (b) a cytosine deaminase domain; and (ii) a guide nucleotide sequence targeting the fusion protein of (i) to a target cytosine (C) base in the CCR2-encoding polynucleotide, wherein the contacting results in the deamination of the target C base by the fusion protein, resulting in a cytosine-guanine (C:G) to thymine-adenine pair (T:A) change in the CCR2-encoding polynucleotide. In some embodiments, the fusion protein of (i) comprises a Gam protein.

[0026] In some embodiments, the C to T change is in the coding sequence of the CCR2-encoding polynucleotide. In some embodiments, the C to T change leads to leads to a mutation in the CCR2 protein.

[0027] In some embodiments, the mutation in the CCR2 protein is a loss-of-function mutation. In certain embodiments, the mutation is selected from the mutations listed in Table 1.

[0028] In certain embodiments, the method is carried out in vitro. In some embodiments, the method is carried out in a cultured cell. In some embodiments, the method is carried out in vivo. In other embodiments, the method is carried out ex vivo.

[0029] In certain embodiments, the method is carried out in a mammal. In some embodiments, the mammal is a rodent. In some embodiments, the mammal is a primate. In some embodiments, the mammal is human.

[0030] In some aspects, the disclosure provides a method of editing a polynucleotide encoding a C-C chemokine receptor type five (CCR2) protein, the method comprising contacting the CCR2-encoding polynucleotide with: (i) a fusion protein comprising: (a) a guide nucleotide sequence-programmable DNA binding protein domain; and (b) a cytosine deaminase domain; and (ii) a guide nucleotide sequence targeting the fusion protein of (i) to a target cytosine (C) base in the CCR2-encoding polynucleotide; wherein the target C base is deaminated by the fusion protein, resulting in a cytosine-guanine pair (C:G) to thymine-adenine pair (T:A) change in the CCR2-encoding polynucleotide. In some embodiments, the fusion protein of (i) comprises a Gam protein.

[0031] In some embodiments, the guide nucleotide sequence-programmable DNA binding protein domain is selected from the group consisting of: a nuclease inactive Cas9 (dCas9) domain, a nuclease inactive Cpf1 domain, a nuclease inactive Argonaute domain, and variants and combinations thereof. In certain embodiments, the guide nucleotide sequence-programmable DNA-binding protein domain comprises a nuclease inactive Cas9 (dCas9) domain.

[0032] In some embodiments, the amino acid sequence of the dCas9 domain comprises mutations corresponding to D10A and/or H840A mutation(s) in SEQ ID NO: 1. In specific embodiments, the amino acid sequence of the dCas9 domain comprises a mutation corresponding to a D10A mutation in SEQ ID NO: 1, and wherein the dCas9 domain comprises a histidine at the position corresponding to amino acid 840 of SEQ ID NO: 1. In some embodiments, the guide nucleotide sequence-programmable DNA-binding protein domain comprises a nuclease inactive Cpf1 (dCpf1) domain. In a specific embodiment, the dCpf1 domain is from a species of Acidaminococcus or Lachnospiraceae. In some embodiments, the guide nucleotide sequence-programmable DNA-binding protein domain comprises a nuclease inactive Argonaute (dAgo) domain. In an embodiment, the dAgo domain is from Natronobacterium gregoryi.

[0033] As a set of non limiting examples, any of the fusion proteins described herein that include a Cas9 domain can use another guide nucleotide sequence-programmable DNA binding protein, such as CasX, CasY, Cpf1, C2c1, C2c2, C2c3, and Argonaute, in place of the Cas9 domain. These may be nuclease inactive variants of the proteins. Guide nucleotide sequence-programmable DNA binding protein include, without limitation, Cas9 (e.g., dCas9 and nCas9), saCas9 (e.g., saCas9d, saCas9n, and saKKH Cas9), CasX, CasY, Cpf1, C2c1, C2c2, C2C3. Argonaute, and any of suitable protein described herein. In some embodiments, the fusion protein described herein comprises a Gam protein, a guide nucleotide sequence-programmable DNA binding protein, and a cytidine deaminase domain.

[0034] In some embodiments, the cytosine deaminase domain comprises an apolipoprotein B mRNA-editing complex (APOBEC) family deaminase. In specific embodiments, the cytosine deaminase is selected from the group consisting of APOBEC1, APOBEC2, APOBEC3A, APOBEC3B, APOBEC3C. APOBEC3D, APOBEC3F, APOBEC3G deaminase, APOBEC3H deaminase, APOBEC4 deaminase, activation-induced deaminase (AID), and pmCDA1. In an embodiment, the cytosine deaminase comprises an amino acid sequence of any one of SEQ ID NOs: 270-292.

[0035] In some embodiments, the fusion protein of (a) further comprises a uracil glycosylase inhibitor (UGI) domain. In certain embodiments, the cytosine deaminase domain is fused to the N-terminus of the guide nucleotide sequence-programmable DNA-binding protein domain. In specific embodiments, the UGI domain is fused to the C-terminus of the guide nucleotide sequence-programmable DNA-binding protein domain. In some embodiments, the cytosine deaminase and the guide nucleotide sequence-programmable DNA-binding protein domain are fused via an optional linker. In an embodiment, the UGI domain is fused to the dCas9 domain via an optional linker.

[0036] In certain embodiments, the fusion protein comprises the structure NH₂-[cytosine deaminase domain]-[optional linker sequence]-[guide nucleotide sequence-programmable DNA-binding protein domain]-[optional linker sequence]-[UGI domain]-COOH.

[0037] In some embodiments, the linker comprises (GGGS)ₙ (SEQ ID NO: 303), (GGGGS)ₙ (SEQ ID NO: 304), (G)ₙ, (EAAAK)ₙ (SEQ ID NO: 305), (GGS)ₙ, SGSETPGTSESATPES (SEQ ID NO: 306), or (XP)ₙ motif, or a combination of any of these, wherein n is independently an integer between 1 and 30, and wherein X is any amino acid. In an embodiment, linker comprises the amino acid sequence SGSETPGTSESATPES (SEQ ID NO: 306). In some embodiments, the linker is (GGS)ₙ, and wherein n is 1, 3, or 7.

[0038] In some aspects, the instant disclosure provides a composition comprising: (i) a fusion protein comprising: (a) a guide nucleotide sequence-programmable DNA binding protein domain; and (b) a cytosine deaminase domain; and (ii) a guide nucleotide sequence targeting the fusion protein of (i) to a polynucleotide encoding a C-C chemokine receptor type five (CCR5) protein. In some embodiments, the fusion protein of (i) comprises a Gam protein.

[0039] In some aspects, the instant disclosure provides a composition comprising: (i) a fusion protein comprising: (a) a guide nucleotide sequence-programmable DNA binding protein domain; and (b) a cytosine deaminase domain; and (ii) a guide nucleotide sequence targeting the fusion protein of (i) to a polynucleotide encoding a C-C chemokine receptor type two (CCR2) protein. In some embodiments, the fusion protein of (i) comprises a Gam protein.

[0040] In some aspects, the instant disclosure provides a composition comprising: (i) a fusion protein comprising: (a) a guide nucleotide sequence-programmable DNA binding protein domain; and (b) a cytosine deaminase domain; (ii) a guide nucleotide sequence targeting the fusion protein of (i) to a polynucleotide encoding a C-C chemokine receptor type five (CCR5) protein; and (iii) a guide nucleotide sequence targeting the fusion protein of (i) to a polynucleotide encoding a C-C chemokine receptor type 2 (CCR2) protein. In some embodiments, the fusion protein of (i) comprises a Gam protein.

[0041] In some embodiments, the guide nucleotide sequence of (ii) is selected from SEQ ID NOs: 381-657.

[0042] In certain embodiments, the composition further comprises a pharmaceutically acceptable carrier.

[0043] In some embodiments, the instant disclosure provides a method of reducing the binding of gp120 and CCR5 in a subject, the method comprising administering to a subject in need thereof a therapeutically effective amount of a composition of the instant disclosure.

[0044] In some embodiments, the instant disclosure provides a method of reducing virus binding to CCR5 in a subject, the method comprising administering to a subject in need thereof a therapeutically effective amount of the composition of the instant disclosure.

[0045] In some embodiments, the instant disclosure provides a method of reducing viral infection in a subject, the method comprising administering to a subject in need thereof a therapeutically effective amount of a composition of the instant disclosure.

[0046] In some embodiments, the instant disclosure provides a method of reducing functional CCR5 receptors on a cell in a subject, the method comprising administering to a subject in need thereof a therapeutically effective amount of the composition of the instant disclosure.

[0047] In some embodiments, the cell is selected from the group consisting of: macrophage, dendritic cell, memory T cell, endothelial cell, epithelial cell, vascular smooth muscle cell, fibroblast, microglia, neuron, and astrocyte.

[0048] In some embodiments, the instant disclosure provides a treating a condition, the method comprising administering to a subject in need thereof a therapeutically effective amount of a composition provided by the instant disclosure, wherein the condition is human immunodeficiency virus (HIV) infection, acquired immune deficiency syndrome (AIDS), an immunologic disease, or a combination thereof.

[0049] In one embodiment, the condition is human immunodeficiency virus (HIV) infection.

[0050] In some embodiments, the instant disclosure provides a method of preventing a condition, the method comprising administering to a subject in need thereof a therapeutically effective amount of a composition provided in the instant disclosure, wherein the condition is human immunodeficiency virus (HIV) infection, acquired immune deficiency syndrome (AIDS), an immunologic disease, or a combination thereof.

[0051] In certain embodiments, the condition is human immunodeficiency virus (HIV) infection.

[0052] In some embodiments, the instant disclosure provides a kit comprising a composition provided in the instant disclosure.

[0053] The summary above is meant to illustrate, in a non-limiting manner, some of the embodiments, advantages, features, and uses of the technology disclosed herein. Other embodiments, advantages, features, and uses of the technology disclosed herein will be apparent from the Detailed Description, the Drawings, the Examples, and the Claims. The details of certain embodiments of the disclosure are set forth in the Detailed Description of Certain Embodiments, as described below. Other features, objects, and advantages of the presented compositions and methods will be apparent from the Definitions, Examples, Figures. and Claims.

### BRIEF DESCRIPTION OF THE DRAWINGS

[0054] The accompanying drawings, which constitute a part of this specification, illustrate several embodiments of the invention and together with the description, serve to explain the principles of the invention.

[0055] FIG. 1 depicts a CCR5 protein structure which shows HIV-protective variants (C20S, C101X, G106R, C178R, Δ32, R223Q, C269F, and FS299) that can be replicated or imitated using genome/base-editing with APOBEC1-Cas9 tools (Tables 1-10). Arrows indicate disulfide bridges that can be disrupted by mutation of cysteine residues using base-editing reactions (TGT=→TAT or TGC→TAC, Table 3). Grey shading with a double ring around the residue indicates small/hydrophobic residues in a transmembrane domain (TM) that can be targeted for base-editing reactions to engineer CCR5 variants with a destabilizing polar residue that prevents membrane integration of folding (similar to the mutation G106R, Tables 1 and 4) using the guide-RNAs described in Tables 3 and 4. Other structurally important proline and cysteine residues are also shown in grey shading with a double ring around the residue (Table 4). Residues demarcated with grey shading and a single ring not specifically labeled with a mutation (i.e., not G106R or R223Q) are glutamine, tryptophan, and arginine residues, which can be changed into stop codons to prevent the translation of full-length functional protein (Table 5), mimicking the effect of the CCR5-Δ32 and FS299 alleles. The sequence corresponds to SEQ ID NO: 310.

[0056] FIGS. 2A to 2C are graphic representations of sequence alignments and structure. FIG. 2A shows a strategy for preventing CCR5 protein production by altering splicing sites: donor site, branch-point, or acceptor sites (Table 2). FIG. 2B shows consensus sequences of the human Lariat-structure branch-point and acceptor sites, suggesting that the guanosine of the acceptor site is an excellent target for Cas9-mediated base-editing of C4T on the complementary strand (Table 2). FIG. 2C shows the genomic sequence of the CCR5 gene showing the junction of intron 2 (lowercase) and exon 2 (capitalized), the cognate start-codon (boldface), potential branch-points (italics), and the cognate donor site (underlined). The sequence corresponds to SEQ ID NO: 311.

[0057] FIG. 3 is a graphic representation of protein and open-reading frame sequences of the CCR5 receptor. HIV-protective variants (C20S, C101X, G106R, C178R, Δ32, R223Q, C269F, and FS299) that can be replicated or imitated using genome/base-editing with APOBEC1-Cas9 tools (Tables 1-10) are underlined. Grey shading indicates small/hydrophobic residues in a transmembrane domain (TM) that can be targeted for base-editing reactions to engineer CCR5 variants with a destabilizing polar residue that prevents membrane integration of folding (similar to the mutation G106R, Tables 1 and 4) using the guide-RNAs described in Tables 3 and 4. Other structurally important proline and cysteine residues are also shown in grey shading with a double ring around the residue (Table 4). Residues demarcated with grey shading and a single ring not specifically labeled with a mutation (i.e., not G106R or R223Q) are glutamine, tryptophan, and arginine residues, which can be changed into stop codons to prevent the translation of full-length functional protein (Table 5), mimicking the effect of the CCR5-Δ32 and FS299 alleles. The nucleotide sequence corresponds to SEQ ID NO: 312 and the amino acid sequence corresponds to SEQ ID NO: 313.

[0058] FIG. 4 is a graphic representation of a numbering scheme used herein. The numbering scheme is based on the predicted location of the target C within the single stranded stretch of DNA (R-loop) displaced by a programmable guide RNA sequence occurring when a DNA-binding domain (e.g, Cas9, nCas9, dCas9) binds a genomic site. The sequence corresponds to SEQ ID NO: 314.

[0059] FIG. 5 is a graphic representation of C to T editing of CCR5 target DNA (SEQ ID NO: 738) in HEK293 cells using KKH-SaBE3 and guide-RNA Q186X-e. The editing was calculated from total reads (MiSeq). Panel A demonstrates that significant editing was observed at position C7 and C13 of SEQ ID NO: 739 (complementary nucleotide sequence is SEQ ID NO: 741), both of which generate premature stop codons in tandem (Q186X and Q188X, see inset graphic of panel A and amino acid sequence of SEQ ID NO: 740). The PAM sequence (SEQ ID NO: 736) is shown as underlined and the last nucleotide of the protospacer (SEQ ID NO: 735) is separated with a line. Raw data used for base-calling and calculating base-editing for KKH-BE3 and Q186X-e treated HEK293 cells is shown in panel B. The indel percentage was 1.97%. Panel C shows raw data collected for untreated control cells.

### DEFINITIONS

[0060] As used herein and in the claims, the singular forms “a,” “an,” and “the” include the singular and the plural reference unless the context clearly indicates otherwise. Thus, for example, a reference to “an agent” includes a single agent and a plurality of such agents.

[0061] As used herein, the term “C-C Chemokine Receptor 2” (also referred to as “C-C Chemokine Receptor type 2,” “CCR2,” “CCR-2,” “cluster of differentiation 192,” and “CD192”) is a chemokine receptor encoded by the CCR2 gene. The CCR2 gene encodes two isoforms of the CCR2 protein, which is expressed on peripheral blood monocytes, activated T cells, B cells, and immature dendritic cells. Known ligands for CCR2 include the monocyte chemotactic proteins (MCPs) MCP-1, -2 and -3, which belong to the family of C-C chemokines.

[0062] As used herein, “C-C Chemokine Receptor 5” (also referred to as “C-C Chemokine Receptor type 5,” “CCR5,” “CCR-5,” “cluster of differentiation-195,” and “CD195,” is a member of the beta chemokine receptor family. This protein is expressed by macrophages, dendritic cells, and memory T cells of the immune system; endothelila cells, epithelial cells, vascular smooth muscle cells, and fibroblasts; and microglia, neurons, and astrocytes in the central nervous system. See, e.g., Barmania and Pepper, Applied & Translational Genomics 2 (2013) 3-16, which is incorporated herein by reference.

[0063] The term “effective amount,” as used herein, refers to an amount of a biologically active agent that is sufficient to elicit a desired biological response. For example, in some embodiments, an effective amount of a nuclease may refer to the amount of the nuclease that is sufficient to induce cleavage of a target site specifically bound and cleaved by the nuclease. In some embodiments, an effective amount of a fusion protein provided herein, e.g., of a fusion protein comprising a nuclease-inactive Cas9 domain and a nucleic acid-editing domain (e.g., a deaminase domain) may refer to the amount of the fusion protein that is sufficient to induce editing of a target site specifically bound and edited by the fusion protein. As will be appreciated by the skilled artisan, the effective amount of an agent, e.g., a fusion protein, a deaminase, a hybrid protein, a protein dimer, a complex of a protein (or protein dimer) and a polynucleotide, or a polynucleotide, may vary depending on various factors, such as, for example, on the desired biological response, e.g., on the specific allele, genome, or target site to be edited, on the cell or tissue being targeted, and/or on the agent being used.

[0064] The term “Gam protein.” as used herein, refers generally to proteins capable of binding to one or more ends of a double strand break of a double stranded nucleic acid (e.g., double stranded DNA). In some embodiments, the Gam protein prevents or inhibits degradation of one or more strands of a nucleic acid at the site of the double strand break. In some embodiments, a Gam protein is a naturally-occurring Gam protein from bacteriophage Mu. or a non-naturally occurring variant thereof.

[0065] The term “loss-of-function mutation” or “inactivating mutation” refers to a mutation that results in the gene product having less or no function (being partially or wholly inactivated). When the allele has a complete loss of function (null allele), it is often called an amorphic mutation in the Muller's morphs schema. Phenotypes associated with such mutations are most often recessive. Exceptions are when the organism is haploid, or when the reduced dosage of a normal gene product is not enough for a normal phenotype (this is called haploinsufficiency).

[0066] The term “gain-of-function mutation” or “activating mutation” refers to a mutation that changes the gene product such that its effect gets stronger (enhanced activation) or even is superseded by a different and abnormal function. A gain of function mutation may also be referred to as a neomorphic mutation. When the new allele is created, a heterozygote containing the newly created allele as well as the original will express the new allele, genetically defining the mutations as dominant phenotypes.

[0067] The terms “treatment,” “treat,” and “treating” refer to a clinical intervention aimed to reverse, alleviate, delay the onset of, or inhibit the progress of a disease or disorder, or one or more symptoms thereof, as described herein. In some embodiments, treatment may be administered after one or more symptoms have developed and/or after a disease has been diagnosed. Treatment may also be continued after symptoms have resolved, for example, to prevent or delay their recurrence. In one embodiment, the methods and compositions disclosed herein may be used to delay the onset of AIDS in an individual infected with HIV. The terms “prevention,” “prevent.” and “preventing” refer to a clinical intervention aimed to inhibit the onset of a disease or disorder, or one or more symptoms thereof, as described herein. In one embodiment, treatment may be administered in the absence of symptoms, e.g., to prevent or delay onset of a symptom or inhibit onset or progression of a disease. In one embodiment, the methods and compositions disclosed herein may be used to prevent infection of a subject with HIV. In one example, treatment may be administered to a susceptible individual prior to the onset of symptoms (e.g., in light of a history of symptoms and/or in light of genetic or other susceptibility factors) in order to prevent the onset of the disease or symptoms of the disease.

[0068] The term “genome” refers to the genetic material of a cell or organism. It typically includes DNA (or RNA in the case of RNA viruses). The genome includes both the genes, the coding regions, the noncoding DNA, and the genomes of the mitochondria and chloroplasts. A genome does not typically include genetic material that is artificially introduced into a cell or organism, e.g., a plasmid that is transformed into a bacteria is not a part of the bacterial genome.

[0069] A “programmable DNA-binding protein” refers to DNA binding proteins that can be programmed to target any desired nucleotide sequence within a genome. To program the DNA-binding protein to bind a desired nucleotide sequence, the DNA binding protein may be modified to change its binding specificity. e.g., zinc finger nuclease (ZFN) or transcription activator-like effector proteins (TALE). ZFNs are artificial restriction enzymes generated by fusing a zinc finger DNA-binding domain to a DNA-cleavage domain. Zinc finger domains can be engineered to target specific desired DNA sequences and this enables zinc-fingers to bind unique sequences within complex genomes. Transcription activator-like effector nucleases (TALEN) are engineered restriction enzymes that can be engineered to cut specific sequences of DNA. They are made by fusing a TAL effector DNA-binding domain to a nuclease domain (e.g., Fok1). Transcription activator-like effectors (TALEs) can be engineered to bind practically any desired DNA sequence. Methods for programming ZFNs and TALEs are familiar to one skilled in the art. For example, such methods are described in Maeder, et al., Mol. Cell 31 (2): 294-301, 2008; Carroll et al., Genetics Society of America, 188 (4): 773-782, 2011: Miller el al., Nature Biotechnology 25 (7): 778-785, 2007; Christian et al., Genetics 186 (2): 757-61, 2008; Li et al., Nucleic Acids Res 39 (1): 359-372, 2010; and Moscou et al., Science 326 (5959): 1501, 2009, the entire contents of each of which are incorporated herein by reference.

[0070] A “guide nucleotide sequence-programmable DNA-binding protein” refers to a protein, a polypeptide, or a domain that is able to bind DNA, and the binding to its target DNA sequence is mediated by a guide nucleotide sequence. Thus, it is appreciated that the guide nucleotide sequence-programmable DNA-binding protein binds to a guide nucleotide sequence. The “guide nucleotide” may be an RNA or DNA molecule (e.g., a single-stranded DNA or ssDNA molecule) that is complementary to the target sequence and can guide the DNA binding protein to the target sequence. As such, a guide nucleotide sequence-programmable DNA-binding protein may be a RNA-programmable DNA-binding protein (e.g., a Cas9 protein), or an ssDNA-programmable DNA-binding protein (e.g., an Argonaute protein). “Programmable” means the DNA-binding protein may be programmed to bind any DNA sequence that the guide nucleotide targets. Exemplary guide nucleotide sequence-programmable DNA-binding proteins include, but are not limited to, Cas9 (e.g., dCas9 and nCas9), saCas9 (e.g., saCasd, saCasn, and saKKH Cas9), CasX, CasY, Cpf1, C2c1, C2c2, C2c3, Argonaute, and any other suitable protein described herein. In some embodiments, the fusion protein described herein comprises a Gam protein, a guide nucleotide sequence-programmable DNA binding protein, and a cytidine deaminase domain.

[0071] In some embodiments, the guide nucleotide sequence exists as a single nucleotide molecule and comprises comprise two domains: (1) a domain that shares homology to a target nucleic acid (e.g., and directs binding of a guide nucleotide sequence-programmable DNA-binding protein to the target); and (2) a domain that binds a guide nucleotide sequence-programmable DNA-binding protein. In some embodiments, domain (2) corresponds to a sequence known as a tracrRNA, and comprises a stem-loop structure. For example, in some embodiments, domain (2) is identical or homologous to a tracrRNA as provided in Jinek et al., Science 337:816-821(2012), which is incorporated herein by reference. Other examples of gRNAs (e.g., those including domain (2)) can be found in U.S. Patent Application Publication US20160208288 and U.S. Patent Application Publication US20160200779, each of which is herein incorporated by reference.

[0072] Because the guide nucleotide sequence hybridizes to a target DNA sequence, the guide nucleotide sequence-programmable DNA-binding proteins are able to specifically bind, in principle, to any sequence complementary to the guide nucleotide sequence. Methods of using guide nucleotide sequence-programmable DNA-binding protein, such as Cas9, for site-specific cleavage (e.g., to modify a genome) are known in the art (see e.g., Cong, L. et al. Multiplex genome engineering using CRISPR/Cas systems. Science 339, 819-823 (2013): Mali, P. et al. RNA-guided human genome engineering via Cas9. Science 339, 823-826 (2013); Hwang. W. Y. et al. Efficient genome editing in zebrafish using a CRISPR-Cas system. Nature biotechnology 31, 227-229 (2013); Jinek. M. et al. RNA-programmed genome editing in human cells. eLife 2, e00471 (2013); Dicarlo, J. E. et al. Genome engineering in Saccharomyces cerevisiae using CRISPR-Cas systems. Nucleic acids research (2013); Jiang. W. et al. RNA-guided editing of bacterial genomes using CRISPR-Cas systems. Nature biotechnology 31, 233-239 (2013); the entire contents of each of which are incorporated herein by reference).

[0073] As used herein, the term “Cas9” or “Cas9 nuclease” refers to an RNA-guided nuclease comprising a Cas9 protein, fragment, or variant thereof. A Cas9 nuclease is also referred to sometimes as a casn1 nuclease or a CRISPR (clustered regularly interspaced short palindromic repeat)-associated nuclease. CRISPR is an adaptive immune system that provides protection against mobile genetic elements (viruses, transposable elements, and conjugative plasmids). CRISPR clusters contain spacers, sequences complementary to antecedent mobile elements, and target invading nucleic acids. CRISPR clusters are transcribed and processed into CRISPR RNA (crRNA). In type II CRISPR systems correct processing of pre-crRNA requires a trans-encoded small RNA (tracrRNA), endogenous ribonuclease 3 (rnc) and a Cas9 protein. The tracrRNA serves as a guide for ribonuclease 3-aided processing of pre-crRNA. Subsequently. Cas9/crRNA/tracrRNA endonucleolytically cleaves linear or circular dsDNA target complementary to the spacer. The target strand not complementary to crRNA is first cut endonucleolytically, then trimmed 3′-5′ exonucleolytically. In nature, DNA-binding and cleavage typically requires protein and both RNAs. However, single guide RNAs (“sgRNA”, or simply “gNRA”) can be engineered so as to incorporate aspects of both the crRNA and tracrRNA into a single RNA species. See, e.g., Jinek et al., Science 337:816-821(2012), which is incorporated herein by reference.

[0074] Cas9 nuclease sequences and structures are known to those of skill in the art (see. e.g., Ferretti et al., Proc. Natl. Acad. Sci. 98:4658-4663(2001); Deltcheva E. el al., Nature 471:602-607(2011); and Jinek et al., Science 337:816-821(2012), the entire contents of each of which are incorporated herein by reference), Cas9 orthologs have been described in various species, including, but not limited to, S. pyogenes and S. thermophilus. Additional suitable Cas9 nucleases and sequences will be apparent to those of skill in the art based on this disclosure, and such Cas9 nucleases and sequences include Cas9 sequences from the organisms and loci disclosed in Chylinski et al., (2013) RNA Biology 10:5, 726-737; which is incorporated herein by reference. In some embodiments, wild type Cas9 corresponds to Cas9 from Streptococcus pyogenes (NCBI Reference Sequence: NC_002737.2. SEQ ID NO: 4 (nucleotide); and Uniprot Reference Sequence: Q99ZW2, SEQ ID NO: 1 (amino acid).

Streptococcus pyogenes Cas9 (Wild Type) Nucleotide Sequence

(SEQ ID NO: 4)
ATGGATAAGAAATACTCAATAGGCTTAGATATCGGCACAAATAGCGTCGG
ATGGGCGGTGATCACTGATGAATATAAGGTTCCGTCTAAAAAGTTCAAGG
TTCTGGGAAATACAGACCGCCACAGTATCAAAAAAAATCTTATAGGGGCT
CTTTTATTTGACAGTGGAGAGACAGCGGAAGCGACTCGTCTCAAACGGAC
AGCTCGTAGAAGGTATACACGTCGGAAGAATCGTATTTGTTATCTACAGG
AGATTTTTTCAAATGAGATGGCGAAAGTAGATGATAGTTTCTTTCATCGA
CTTGAAGAGTCTTTTTTGGTGGAAGAAGACAAGAAGCATGAACGTCATCC
TATTTTTGGAAATATAGTAGATGAAGTTGCTTATCATGAGAAATATCCAA
CTATCTATCATCTGCGAAAAAAATTGGTAGATTCTACTGATAAAGCGGAT
TTGCGCTTAATCTATTTGGCCTTAGCGCATATGATTAAGTTTCGTGGTCA
TTTTTTGATTGAGGGAGATTTAAATCCTGATAATAGTGATGTGGACAAAC
TATTTATCCAGTTGGTACAAACCTACAATCAATTATTTGAAGAAAACCCT
ATTAACGCAAGTGGAGTAGATGCTAAAGCGATTCTTTCTGCACGATTGAG
TAAATCAAGACGATTAGAAAATCTCATTGCTCAGCTCCCCGGTGAGAAGA
AAAATGGCTTATTTGGGAATCTCATTGCTTTGTCATTGGGTTTGACCCCT
AATTTTAAATCAAATTTTGATTTGGCAGAAGATGCTAAATTACAGCTTTC
AAAAGATACTTACGATGATGATTTAGATAATTTATTGGCGCAAATTGGAG
ATCAATATGCTGATTTGTTTTTGGCAGCTAAGAATTTATCAGATGCTATT
TTACTTTCAGATATCCTAAGAGTAAATACTGAAATAACTAAGGCTCCCCT
ATCAGCTTCAATGATTAAACGCTACGATGAACATCATCAAGACTTGACTC
TTTTAAAAGCTTTAGTTCGACAACAACTTCCAGAAAAGTATAAAGAAATC
TTTTTTGATCAATCAAAAAACGGATATGCAGGTTATATTGATGGGGGAGC
TAGCCAAGAAGAATTTTATAAATTTATCAAACCAATTTTAGAAAAAATGG
ATGGTACTGAGGAATTATTGGTGAAACTAAATCGTGAAGATTTGCTGCGC
AAGCAACGGACCTTTGACAACGGCTCTATTCCCCATCAAATTCACTTGGG
TGAGCTGCATGCTATTTTGAGAAGACAAGAAGACTTTTATCCATTTTTAA
AAGACAATCGTGAGAAGATTGAAAAAATCTTGACTTTTCGAATTCCTTAT
TATGTTGGTCCATTGGCGCGTGGCAATAGTCGTTTTGCATGGATGACTCG
GAAGTCTGAAGAAACAATTACCCCATGGAATTTTGAAGAAGTTGTCGATA
AAGGTGCTTCAGCTCAATCATTTATTGAACGCATGACAAACTTTGATAAA
AATCTTCCAAATGAAAAAGTACTACCAAAACATAGTTTGCTTTATGAGTA
TTTTACGGTTTATAACGAATTGACAAAGGTCAAATATGTTACTGAAGGAA
TGCGAAAACCAGCATTTCTTTCAGGTGAACAGAAGAAAGCCATTGTTGAT
TTACTCTTCAAAACAAATCGAAAAGTAACCGTTAAGCAATTAAAAGAAGA
TTATTTCAAAAAAATAGAATGTTTTGATAGTGTTGAAATTTCAGGAGTTG
AAGATAGATTTAATGCTTCATTAGGTACCTACCATGATTTGCTAAAAATT
ATTAAAGATAAAGATTTTTTGGATAATGAAGAAAATGAAGATATCTTAGA
GGATATTGTTTTAACATTGACCTTATTTGAAGATAGGGAGATGATTGAGG
AAAGACTTAAAACATATGCTCACCTCTTTGATGATAAGGTGATGAAACAG
CTTAAACGTCGCCGTTATACTGGTTGGGGACGTTTGTCTCGAAAATTGAT
TAATGGTATTAGGGATAAGCAATCTGGCAAAACAATATTAGATTTTTTGA
AATCAGATGGTTTTGCCAATCGCAATTTTATGCAGCTGATCCATGATGAT
AGTTTGACATTTAAAGAAGACATTCAAAAAGCACAAGTGTCTGGACAAGG
CGATAGTTTACATGAACATATTGCAAATTTAGCTGGTAGCCCTGCTATTA
AAAAAGGTATTTTACAGACTGTAAAAGTTGTTGATGAATTGGTCAAAGTA
ATGGGGCGGCATAAGCCAGAAAATATCGTTATTGAAATGGCACGTGAAAA
TCAGACAACTCAAAAGGGCCAGAAAAATTCGCGAGAGCGTATGAAACGAA
TCGAAGAAGGTATCAAAGAATTAGGAAGTCAGATTCTTAAAGAGCATCCT
GTTGAAAATACTCAATTGCAAAATGAAAAGCTCTATCTCTATTATCTCCA
AAATGGAAGAGACATGTATGTGGACCAAGAATTAGATATTAATCGTTTAA
GTGATTATGATGTCGATCACATTGTTCCACAAAGTTTCCTTAAAGACGAT
TCAATAGACAATAAGGTCTTAACGCGTTCTGATAAAAATCGTGGTAAATC
GGATAACGTTCCAAGTGAAGAAGTAGTCAAAAAGATGAAAAACTATTGGA
GACAACTTCTAAACGCCAAGTTAATCACTCAACGTAAGTTTGATAATTTA
ACGAAAGCTGAACGTGGAGGTTTGAGTGAACTTGATAAAGCTGGTTTTAT
CAAACGCCAATTGGTTGAAACTCGCCAAATCACTAAGCATGTGGCACAAA
TTTTGGATAGTCGCATGAATACTAAATACGATGAAAATGATAAACTTATT
CGAGAGGTTAAAGTGATTACCTTAAAATCTAAATTAGTTTCTGACTTCCG
AAAAGATTTCCAATTCTATAAAGTACGTGAGATTAACAATTACCATCATG
CCCATGATGCGTATCTAAATGCCGTCGTTGGAACTGCTTTGATTAAGAAA
TATCCAAAACTTGAATCGGAGTTTGTCTATGGTGATTATAAAGTTTATGA
TGTTCGTAAAATGATTGCTAAGTCTGAGCAAGAAATAGGCAAAGCAACCG
CAAAATATTTCTTTTACTCTAATATCATGAACTTCTTCAAAACAGAAATT
ACACTTGCAAATGGAGAGATTCGCAAACGCCCTCTAATCGAAACTAATGG
GGAAACTGGAGAAATTGTCTGGGATAAAGGGCGAGATTTTGCCACAGTGC
GCAAAGTATTGTCCATGCCCCAAGTCAATATTGTCAAGAAAACAGAAGTA
CAGACAGGCGGATTCTCCAAGGAGTCAATTTTACCAAAAAGAAATTCGGA
CAAGCTTATTGCTCGTAAAAAAGACTGGGATCCAAAAAAATATGGTGGTT
TTGATAGTCCAACGGTAGCTTATTCAGTCCTAGTGGTTGCTAAGGTGGAA
AAAGGGAAATCGAAGAAGTTAAAATCCGTTAAAGAGTTACTAGGGATCAC
AATTATGGAAAGAAGTTCCTTTGAAAAAAATCCGATTGACTTTTTAGAAG
CTAAAGGATATAAGGAAGTTAAAAAAGACTTAATCATTAAACTACCTAAA
TATAGTCTTTTTGAGTTAGAAAACGGTCGTAAACGGATGCTGGCTAGTGC
CGGAGAATTACAAAAAGGAAATGAGCTGGCTCTGCCAAGCAAATATGTGA
ATTTTTTATATTTAGCTAGTCATTATGAAAAGTTGAAGGGTAGTCCAGAA
GATAACGAACAAAAACAATTGTTTGTGGAGCAGCATAAGCATTATTTAGA
TGAGATTATTGAGCAAATCAGTGAATTTTCTAAGCGTGTTATTTTAGCAG
ATGCCAATTTAGATAAAGTTCTTAGTGCATATAACAAACATAGAGACAAA
CCAATACGTGAACAAGCAGAAAATATTATTCATTTATTTACGTTGACGAA
TCTTGGAGCTCCCGCTGCTTTTAAATATTTTGATACAACAATTGATCGTA
AACGATATACGTCTACAAAAGAAGTTTTAGATGCCACTCTTATCCATCAA
TCCATCACTGGTCTTTATGAAACACGCATTGATTTGAGTCAGCTAGGAGG
TGACTGA

Streptococcus pyogenes Cas9 (Wild Type) Protein Sequence

(SEQ ID NO: 1)
MDKKYSIGLDIGTNSVGWAVITDEYKVPSKKFKVLGNTDRHSIKKNLIGA
LLFDSGETAEATRLKRTARRRYTRRKNRICYLQEIFSNEMAKVDDSFFHR
LEESFLVEEDKKHERHPIFGNIVDEVAYHEKYPTIYHLRKKLVDSTDKAD
LRLIYLALAHMIKFRGHFLIEGDLNPDNSDVDKLFIQLVQTYNQLFEENP
INASGVDAKAILSARLSKSRRLENLIAQLPGEKKNGLFGNLIALSLGLTP
NFKSNFDLAEDAKLQLSKDTYDDDLDNLLAQIGDQYADLFLAAKNLSDAI
LLSDILRVNTEITKAPLSASMIKRYDEHHQDLTLLKALVRQQLPEKYKEI
FFDQSKNGYAGYIDGGASQEEFYKFIKPILEKMDGTEELLVKLNREDLLR
KQRTFDNGSIPHQIHLGELHAILRRQEDFYPFLKDNREKIEKILTFRIPY
YVGPLARGNSRFAWMTRKSEETITPWNFEEVVDKGASAQSFIERMTNFDK
NLPNEKVLPKHSLLYEYFTVYNELTKVKYVTEGMRKPAFLSGEQKKAIVD
LLFKTNRKVTVKQLKEDYFKKIECFDSVEISGVEDRFNASLGTYHDLLKI
IKDKDFLDNEENEDILEDIVLTLTLPEDREMIEERLKTYAHLFDDKVMKQ
LKRRRYTGWGRLSRKLINGIRDKQSGKTILDFLKSDGFANRNFMQLIHDD
SLTFKEDIQKAQVSGQGDSLHEHIANLAGSPAIKKGILQTVKVVDELVKV
MGRHKPENIVIEMARENQTTQKGQKNSRERMKRIEEGIKELGSQILKEHP
VENTQLQNEKLYLYYLQNGRDMYVDQELDINRLSDYDVDHIVPQSFLKDD
SIDNKVLTRSDKNRGKSDNVPSEEVVKKMKNYWRQLLNAKLITQRKFDNL
TKAERGGLSELDKAGFIKRQLVETRQITKHVAQILDSRMNTKYDENDKLI
REVKVITLKSKLVSDFRKDFQFYKVREINNYHHAHDAYLNAVVGTALIKK
YPKLESEFVYGDYKVYDVRKMIAKSEQEIGKATAKYFFYSNIMNFFKTEI
TLANGEIRKRPLIETNGETGEIVWDKGRDFATVRKVLSMPQVNIVKKTEV
QTGGFSKESILPKRNSDKLIARKKDWDPKKYGGFDSPTVAYSVLVVAKVE
KGKSKKLKSVKELLGITIMERSSFEKNPIDFLEAKGYKEVKKDLIIKLPK
YSLFELENGRKRMLASAGELQKGNELALPSKYVNFLYLASHYEKLKGSPE
DNEQKQLFVEQHKHYLDEIIEQISEFSKRVILADANLDKVLSAYNKHRDK
PIREQAENIIHLFTLTNLGAPAAFKYFDTTIDRKRYTSTKEVLDATLIHQ
SITGLYETRIDLSQLGGD (single underline: HNH domain;
double underline: RuvC domain)

[0075] In some embodiments, wild type Cas9 corresponds to Cas9 from Staphylococcus aureus (NCBI Reference Sequence: WP_001573634.1, SEQ ID NO: 5 (amino acid).

Staphylococcus aureus Cas9 (Wild Type) Protein Sequence

(SEQ ID NO: 5)
MKRNYILGLDIGITSVGYGIIDYETRDVIDAGVRLFKEANVENNEGRRSK
RGARRLKRRRRHRIQRVKKLLFDYNLLTDHSELSGINPYEARVKGLSQKL
SEEEFSAALLHLAKRRGVHNVNEVEEDTGNELSTKEQISRNSKALEEKYV
AELQLERLKKDGEVRGSINRFKTSDYVKEAKQLLKVQKAYHQLDQSFIDT
YIDLLETRRTYYEGPGEGSPFGWKDIKEWYEMLMGHCTYFPEELRSVKYA
YNADLYNALNDLNNLVITRDENEKLEYYEKFQIIENVFKQKKKPTLKQIA
KEILVNEEDIKGYRVTSTGKPEFTNLKVYHDIKDITARKEIIENAELLDQ
IAKILTIYQSSEDIQEELTNLNSELTQEEIEQISNLKGYTGTHNLSLKAI
NLILDELWHTNDNQIAIFNRLKLVPKKVDLSQQKEIPTTLVDDFILSPVV
KRSFIQSIKVINAIIKKYGLPNDIIIELAREKNSKDAQKMINEMQKRNRQ
TNERIEEIIRTTGKENAKYLIEKIKLHDMQEGKCLYSLEAIPLEDLLNNP
FNYEVDHIIPRSVSFDNSFNNKVLVKQEENSKKGNRTPFQYLSSSDSKIS
YETFKKHILNLAKGKGRISKTKKEYLLEERDINRFSVQKDFINRNLVDTR
YATRGLMNLLRSYFRVNNLDVKVKSINGGFTSFLRRKWKFKKERNKGYKH
HAEDALIIANADFIFKEWKKLDKAKKVMENQMFEEKQAESMPEIETEQEY
KEIFITPHQIKHIKDFKDYKYSHRVDKKPNRELINDTLYSTRKDDKGNTL
IVNNLNGLYDKDNDKLKKLINKSPEKLLMYHHDPQTYQKLKLIMEQYGDE
KNPLYKYYEETGNYLTKYSKKDNGPVIKKIKYYGNKLNAHLDITDDYPNS
RNKVVKLSLKPYRFDVYLDNGVYKFVTVKNLDVIKKENYYEVNSKCYEEA
KKLKKISNQAEFIASFYNNDLIKINGELYRVIGVNNDLLNRIEVNMIDIT
YREYLENMNDKRPPRIIKTIASKTQSIKKYSTDILGNLYEVKSKKHPQII
KKG

[0076] In some embodiments, wild type Cas9 corresponds to Cas9 from Streptococcus pyogenes (NCBI Reference Sequence: NC_017053.1. SEQ ID NO: 679 (nucleotide); SEQ ID NO: 680 (amino acid)).

(SEQ ID NO: 679)
ATGGATAAGAAATACTCAATAGGCTTAGATATCGGCACAAATAGCGTCGG
ATGGGCGGTGATCACTGATGATTATAAGGTTCCGTCTAAAAAGTTCAAGG
TTCTGGGAAATACAGACCGCCACAGTATCAAAAAAAATCTTATAGGGGCT
CTTTTATTTGGCAGTGGAGAGACAGCGGAAGCGACTCGTCTCAAACGGAC
AGCTCGTAGAAGGTATACACGTCGGAAGAATCGTATTTGTTATCTACAGG
AGATTTTTTCAAATGAGATGGCGAAAGTAGATGATAGTTTCTTTCATCGA
CTTGAAGAGTCTTTTTTGGTGGAAGAAGACAAGAAGCATGAACGTCATCC
TATTTTTGGAAATATAGTAGATGAAGTTGCTTATCATGAGAAATATCCAA
CTATCTATCATCTGCGAAAAAAATTGGCAGATTCTACTGATAAAGCGGAT
TTGCGCTTAATCTATTTGGCCTTAGCGCATATGATTAAGTTTCGTGGTCA
TTTTTTGATTGAGGGAGATTTAAATCCTGATAATAGTGATGTGGACAAAC
TATTTATCCAGTTGGTACAAATCTACAATCAATTATTTGAAGAAAACCCT
ATTAACGCAAGTAGAGTAGATGCTAAAGCGATTCTTTCTGCACGATTGAG
TAAATCAAGACGATTAGAAAATCTCATTGCTCAGCTCCCCGGTGAGAAGA
GAAATGGCTTGTTTGGGAATCTCATTGCTTTGTCATTGGGATTGACCCCT
AATTTTAAATCAAATTTTGATTTGGCAGAAGATGCTAAATTACAGCTTTC
AAAAGATACTTACGATGATGATTTAGATAATTTATTGGCGCAAATTGGAG
ATCAATATGCTGATTTGTTTTTGGCAGCTAAGAATTTATCAGATGCTATT
TTACTTTCAGATATCCTAAGAGTAAATAGTGAAATAACTAAGGCTCCCCT
ATCAGCTTCAATGATTAAGCGCTACGATGAACATCATCAAGACTTGACTC
TTTTAAAAGCTTTAGTTCGACAACAACTTCCAGAAAAGTATAAAGAAATC
TTTTTTGATCAATCAAAAAACGGATATGCAGGTTATATTGATGGGGGAGC
TAGCCAAGAAGAATTTTATAAATTTATCAAACCAATTTTAGAAAAAATGG
ATGGTACTGAGGAATTATTGGTGAAACTAAATCGTGAAGATTTGCTGCGC
AAGCAACGGACCTTTGACAACGGCTCTATTCCCCATCAAATTCACTTGGG
TGAGCTGCATGCTATTTTGAGAAGACAAGAAGACTTTTATCCATTTTTAA
AAGACAATCGTGAGAAGATTGAAAAAATCTTGACTTTTCGAATTCCTTAT
TATGTTGGTCCATTGGCGCGTGGCAATAGTCGTTTTGCATGGATGACTCG
GAAGTCTGAAGAAACAATTACCCCATGGAATTTTGAAGAAGTTGTCGATA
AAGGTGCTTCAGCTCAATCATTTATTGAACGCATGACAAACTTTGATAAA
AATCTTCCAAATGAAAAAGTACTACCAAAACATAGTTTGCTTTATGAGTA
TTTTACGGTTTATAACGAATTGACAAAGGTCAAATATGTTACTGAGGGAA
TGCGAAAACCAGCATTTCTTTCAGGTGAACAGAAGAAAGCCATTGTTGAT
TTACTCTTCAAAACAAATCGAAAAGTAACCGTTAAGCAATTAAAAGAAGA
TTATTTCAAAAAAATAGAATGTTTTGATAGTGTTGAAATTTCAGGAGTTG
AAGATAGATTTAATGCTTCATTAGGCGCCTACCATGATTTGCTAAAAATT
ATTAAAGATAAAGATTTTTTGGATAATGAAGAAAATGAAGATATCTTAGA
GGATATTGTTTTAACATTGACCTTATTTGAAGATAGGGGGATGATTGAGG
AAAGACTTAAAACATATGCTCACCTCTTTGATGATAAGGTGATGAAACAG
CTTAAACGTCGCCGTTATACTGGTTGGGGACGTTTGTCTCGAAAATTGAT
TAATGGTATTAGGGATAAGCAATCTGGCAAAACAATATTAGATTTTTTGA
AATCAGATGGTTTTGCCAATCGCAATTTTATGCAGCTGATCCATGATGAT
AGTTTGACATTTAAAGAAGATATTCAAAAAGCACAGGTGTCTGGACAAGG
CCATAGTTTACATGAACAGATTGCTAACTTAGCTGGCAGTCCTGCTATTA
AAAAAGGTATTTTACAGACTGTAAAAATTGTTGATGAACTGGTCAAAGTA
ATGGGGCATAAGCCAGAAAATATCGTTATTGAAATGGCACGTGAAAATCA
GACAACTCAAAAGGGCCAGAAAAATTCGCGAGAGCGTATGAAACGAATCG
AAGAAGGTATCAAAGAATTAGGAAGTCAGATTCTTAAAGAGCATCCTGTT
GAAAATACTCAATTGCAAAATGAAAAGCTCTATCTCTATTATCTACAAAA
TGGAAGAGACATGTATGTGGACCAAGAATTAGATATTAATCGTTTAAGTG
ATTATGATGTCGATCACATTGTTCCACAAAGTTTCATTAAAGACGATTCA
ATAGACAATAAGGTACTAACGCGTTCTGATAAAAATCGTGGTAAATCGGA
TAACGTTCCAAGTGAAGAAGTAGTCAAAAAGATGAAAAACTATTGGAGAC
AACTTCTAAACGCCAAGTTAATCACTCAACGTAAGTTTGATAATTTAACG
AAAGCTGAACGTGGAGGTTTGAGTGAACTTGATAAAGCTGGTTTTATCAA
ACGCCAATTGGTTGAAACTCGCCAAATCACTAAGCATGTGGCACAAATTT
TGGATAGTCGCATGAATACTAAATACGATGAAAATGATAAACTTATTCGA
GAGGTTAAAGTGATTACCTTAAAATCTAAATTAGTTTCTGACTTCCGAAA
AGATTTCCAATTCTATAAAGTACGTGAGATTAACAATTACCATCATGCCC
ATGATGCGTATCTAAATGCCGTCGTTGGAACTGCTTTGATTAAGAAATAT
CCAAAACTTGAATCGGAGTTTGTCTATGGTGATTATAAAGTTTATGATGT
TCGTAAAATGATTGCTAAGTCTGAGCAAGAAATAGGCAAAGCAACCGCAA
AATATTTCTTTTACTCTAATATCATGAACTTCTTCAAAACAGAAATTACA
CTTGCAAATGGAGAGATTCGCAAACGCCCTCTAATCGAAACTAATGGGGA
AACTGGAGAAATTGTCTGGGATAAAGGGCGAGATTTTGCCACAGTGCGCA
AAGTATTGTCCATGCCCCAAGTCAATATTGTCAAGAAAACAGAAGTACAG
ACAGGCGGATTCTCCAAGGAGTCAATTTTACCAAAAAGAAATTCGGACAA
GCTTATTGCTCGTAAAAAAGACTGGGATCCAAAAAAATATGGTGGTTTTG
ATAGTCCAACGGTAGCTTATTCAGTCCTAGTGGTTGCTAAGGTGGAAAAA
GGGAAATCGAAGAAGTTAAAATCCGTTAAAGAGTTACTAGGGATCACAAT
TATGGAAAGAAGTTCCTTTGAAAAAAATCCGATTGACTTTTTAGAAGCTA
AAGGATATAAGGAAGTTAAAAAAGACTTAATCATTAAACTACCTAAATAT
AGTCTTTTTGAGTTAGAAAACGGTCGTAAACGGATGCTGGCTAGTGCCGG
AGAATTACAAAAAGGAAATGAGCTGGCTCTGCCAAGCAAATATGTGAATT
TTTTATATTTAGCTAGTCATTATGAAAAGTTGAAGGGTAGTCCAGAAGAT
AACGAACAAAAACAATTGTTTGTGGAGCAGCATAAGCATTATTTAGATGA
GATTATTGAGCAAATCAGTGAATTTTCTAAGCGTGTTATTTTAGCAGATG
CCAATTTAGATAAAGTTCTTAGTGCATATAACAAACATAGAGACAAACCA
ATACGTGAACAAGCAGAAAATATTATTCATTTATTTACGTTGACGAATCT
TGGAGCTCCCGCTGCTTTTAAATATTTTGATACAACAATTGATCGTAAAC
GATATACGTCTACAAAAGAAGTTTTAGATGCCACTCTTATCCATCAATCC
ATCACTGGTCTTTATGAAACACGCATTGATTTGAGTCAGCTAGGAGGTGA
CTGA
(SEQ ID NO: 680)
MDKKYSIGLDIGTNSVGWAVITDDYKVPSKKFKVLGNTDRHSIKKNLIGA
LLFGSGETAEATRLKRTARRRYTRRKNRICYLQEIFSNEMAKVDDSFFHR
LEESFLVEEDKKHERHPIFGNIVDEVAYHEKYPTIYHLRKKLADSTDKAD
LRLIYLALAHMIKFRGHFLIEGDLNPDNSDVDKLFIQLVQIYNQLFEENP
INASRVDAKAILSARLSKSRRLENLIAQLPGEKRNGLFGNLIALSLGLTP
NFKSNFDLAEDAKLQLSKDTYDDDLDNLLAQIGDQYADLFLAAKNLSDAI
LLSDILRVNSEITKAPLSASMIKRYDEHHQDLTLLKALVRQQLPEKYKEI
FFDQSKNGYAGYIDGGASQEEFYKFIKPILEKMDGTEELLVKLNREDLLR
KQRTFDNGSIPHQIHLGELHAILRRQEDFYPFLKDNREKIEKILTFRIPY
YVGPLARGNSRFAWMTRKSEETITPWNFEEVVDKGASAQSFIERMTNFDK
NLPNEKVLPKHSLLYEYFTVYNELTKVKYVTEGMRKPAFLSGEQKKAIVD
LLFKTNRKVTVKQLKEDYFKKIECFDSVEISGVEDRFNASLGAYHDLLKI
IKDKDFLDNEENEDILEDIVLTLTLFEDRGMIEERLKTYAHLFDDKVMKQ
LKRRRYTGWGRLSRKLINGIRDKQSGKTILDFLKSDGFANRNFMQLIHDD
SLTFKEDIQKAQVSGQGHSLHEQIANLAGSPAIKKGILQTVKIVDELVKV
MGHKPENIVIEMARENQTTQKGQKNSRERMKRIEEGIKELGSQILKEHPV
ENTQLQNEKLYLYYLQNGRDMYVDQELDINRLSDYDVDHIVPQSFIKDDS
IDNKVLTRSDKNRGKSDNVPSEEVVKKMKNYWRQLLNAKLITQRKFDNLT
KAERGGLSELDKAGFIKRQLVETRQITKHVAQILDSRMNTKYDENDKLIR
EVKVITLKSKLVSDFRKDFQFYKVREINNYHHAHDAYLNAVVGTALIKKY
PKLESEFVYGDYKVYDVRKMIAKSEQEIGKATAKYFFYSNIMNFFKTEIT
LANGEIRKRPLIETNGETGEIVWDKGRDFATVRKVLSMPQVNIVKKTEVQ
TGGFSKESILPKRNSDKLIARKKDWDPKKYGGFDSPTVAYSVLVVAKVEK
GKSKKLKSVKELLGITIMERSSFEKNPIDFLEAKGYKEVKKDLIIKLPKY
SLFELENGRKRMLASAGELQKGNELALPSKYVNFLYLASHYEKLKGSPED
NEQKQLFVEQHKHYLDEIIEQISEFSKRVILADANLDKVLSAYNKHRDKP
IREQAENIIHLFTLTNLGAPAAFKYFDTTIDRKRYTSTKEVLDATLIHQS
ITGLYETRIDLSQLGGD (single underline: HNH domain;
double underline: RuvC domain)

[0077] In some embodiments, wild type Cas9 corresponds to, or comprises, Streptococcus pyogenes Cas9 (SEQ ID NO: 681 (nucleotide) and/or SEQ ID NO: 682 (amino acid)):

(SEQ ID NO: 681)
ATGGATAAAAAGTATTCTATTGGTTTAGACATCGGCACTAATTCCGTTGG
ATGGGCTGTCATAACCGATGAATACAAAGTACCTTCAAAGAAATTTAAGG
TGTTGGGGAACACAGACCGTCATTCGATTAAAAAGAATCTTATCGGTGCC
CTCCTATTCGATAGTGGCGAAACGGCAGAGGCGACTCGCCTGAAACGAAC
CGCTCGGAGAAGGTATACACGTCGCAAGAACCGAATATGTTACTTACAAG
AAATTTTTAGCAATGAGATGGCCAAAGTTGACGATTCTTTCTTTCACCGT
TTGGAAGAGTCCTTCCTTGTCGAAGAGGACAAGAAACATGAACGGCACCC
CATCTTTGGAAACATAGTAGATGAGGTGGCATATCATGAAAAGTACCCAA
CGATTTATCACCTCAGAAAAAAGCTAGTTGACTCAACTGATAAAGCGGAC
CTGAGGTTAATCTACTTGGCTCTTGCCCATATGATAAAGTTCCGTGGGCA
CTTTCTCATTGAGGGTGATCTAAATCCGGACAACTCGGATGTCGACAAAC
TGTTCATCCAGTTAGTACAAACCTATAATCAGTTGTTTGAAGAGAACCCT
ATAAATGCAAGTGGCGTGGATGCGAAGGCTATTCTTAGCGCCCGCCTCTC
TAAATCCCGACGGCTAGAAAACCTGATCGCACAATTACCCGGAGAGAAGA
AAAATGGGTTGTTCGGTAACCTTATAGCGCTCTCACTAGGCCTGACACCA
AATTTTAAGTCGAACTTCGACTTAGCTGAAGATGCCAAATTGCAGCTTAG
TAAGGACACGTACGATGACGATCTCGACAATCTACTGGCACAAATTGGAG
ATCAGTATGCGGACTTATTTTTGGCTGCCAAAAACCTTAGCGATGCAATC
CTCCTATCTGACATACTGAGAGTTAATACTGAGATTACCAAGGCGCCGTT
ATCCGCTTCAATGATCAAAAGGTACGATGAACATCACCAAGACTTGACAC
TTCTCAAGGCCCTAGTCCGTCAGCAACTGCCTGAGAAATATAAGGAAATA
TTCTTTGATCAGTCGAAAAACGGGTACGCAGGTTATATTGACGGCGGAGC
GAGTCAAGAGGAATTCTACAAGTTTATCAAACCCATATTAGAGAAGATGG
ATGGGACGGAAGAGTTGCTTGTAAAACTCAATCGCGAAGATCTACTGCGA
AAGCAGCGGACTTTCGACAACGGTAGCATTCCACATCAAATCCACTTAGG
CGAATTGCATGCTATACTTAGAAGGCAGGAGGATTTTTATCCGTTCCTCA
AAGACAATCGTGAAAAGATTGAGAAAATCCTAACCTTTCGCATACCTTAC
TATGTGGGACCCCTGGCCCGAGGGAACTCTCGGTTCGCATGGATGACAAG
AAAGTCCGAAGAAACGATTACTCCATGGAATTTTGAGGAAGTTGTCGATA
AAGGTGCGTCAGCTCAATCGTTCATCGAGAGGATGACCAACTTTGACAAG
AATTTACCGAACGAAAAAGTATTGCCTAAGCACAGTTTACTTTACGAGTA
TTTCACAGTGTACAATGAACTCACGAAAGTTAAGTATGTCACTGAGGGCA
TGCGTAAACCCGCCTTTCTAAGCGGAGAACAGAAGAAAGCAATAGTAGAT
CTGTTATTCAAGACCAACCGCAAAGTGACAGTTAAGCAATTGAAAGAGGA
CTACTTTAAGAAAATTGAATGCTTCGATTCTGTCGAGATCTCCGGGGTAG
AAGATCGATTTAATGCGTCACTTGGTACGTATCATGACCTCCTAAAGATA
ATTAAAGATAAGGACTTCCTGGATAACGAAGAGAATGAAGATATCTTAGA
AGATATAGTGTTGACTCTTACCCTCTTTGAAGATCGGGAAATGATTGAGG
AAAGACTAAAAACATACGCTCACCTGTTCGACGATAAGGTTATGAAACAG
TTAAAGAGGCGTCGCTATACGGGCTGGGGACGATTGTCGCGGAAACTTAT
CAACGGGATAAGAGACAAGCAAAGTGGTAAAACTATTCTCGATTTTCTAA
AGAGCGACGGCTTCGCCAATAGGAACTTTATGCAGCTGATCCATGATGAC
TCTTTAACCTTCAAAGAGGATATACAAAAGGCACAGGTTTCCGGACAAGG
GGACTCATTGCACGAACATATTGCGAATCTTGCTGGTTCGCCAGCCATCA
AAAAGGGCATACTCCAGACAGTCAAAGTAGTGGATGAGCTAGTTAAGGTC
ATGGGACGTCACAAACCGGAAAACATTGTAATCGAGATGGCACGCGAAAA
TCAAACGACTCAGAAGGGGCAAAAAAACAGTCGAGAGCGGATGAAGAGAA
TAGAAGAGGGTATTAAAGAACTGGGCAGCCAGATCTTAAAGGAGCATCCT
GTGGAAAATACCCAATTGCAGAACGAGAAACTTTACCTCTATTACCTACA
AAATGGAAGGGACATGTATGTTGATCAGGAACTGGACATAAACCGTTTAT
CTGATTACGACGTCGATCACATTGTACCCCAATCCTTTTTGAAGGACGAT
TCAATCGACAATAAAGTGCTTACACGCTCGGATAAGAACCGAGGGAAAAG
TGACAATGTTCCAAGCGAGGAAGTCGTAAAGAAAATGAAGAACTATTGGC
GGCAGCTCCTAAATGCGAAACTGATAACGCAAAGAAAGTTCGATAACTTA
ACTAAAGCTGAGAGGGGTGGCTTGTCTGAACTTGACAAGGCCGGATTTAT
TAAACGTCAGCTCGTGGAAACCCGCCAAATCACAAAGCATGTTGCACAGA
TACTAGATTCCCGAATGAATACGAAATACGACGAGAACGATAAGCTGATT
CGGGAAGTCAAAGTAATCACTTTAAAGTCAAAATTGGTGTCGGACTTCAG
AAAGGATTTTCAATTCTATAAAGTTAGGGAGATAAATAACTACCACCATG
CGCACGACGCTTATCTTAATGCCGTCGTAGGGACCGCACTCATTAAGAAA
TACCCGAAGCTAGAAAGTGAGTTTGTGTATGGTGATTACAAAGTTTATGA
CGTCCGTAAGATGATCGCGAAAAGCGAACAGGAGATAGGCAAGGCTACAG
CCAAATACTTCTTTTATTCTAACATTATGAATTTCTTTAAGACGGAAATC
ACTCTGGCAAACGGAGAGATACGCAAACGACCTTTAATTGAAACCAATGG
GGAGACAGGTGAAATCGTATGGGATAAGGGCCGGGACTTCGCGACGGTGA
GAAAAGTTTTGTCCATGCCCCAAGTCAACATAGTAAAGAAAACTGAGGTG
CAGACCGGAGGGTTTTCAAAGGAATCGATTCTTCCAAAAAGGAATAGTGA
TAAGCTCATCGCTCGTAAAAAGGACTGGGACCCGAAAAAGTACGGTGGCT
TCGATAGCCCTACAGTTGCCTATTCTGTCCTAGTAGTGGCAAAAGTTGAG
AAGGGAAAATCCAAGAAACTGAAGTCAGTCAAAGAATTATTGGGGATAAC
GATTATGGAGCGCTCGTCTTTTGAAAAGAACCCCATCGACTTCCTTGAGG
CGAAAGGTTACAAGGAAGTAAAAAAGGATCTCATAATTAAACTACCAAAG
TATAGTCTGTTTGAGTTAGAAAATGGCCGAAAACGGATGTTGGCTAGCGC
CGGAGAGCTTCAAAAGGGGAACGAACTCGCACTACCGTCTAAATACGTGA
ATTTCCTGTATTTAGCGTCCCATTACGAGAAGTTGAAAGGTTCACCTGAA
GATAACGAACAGAAGCAACTTTTTGTTGAGCAGCACAAACATTATCTCGA
CGAAATCATAGAGCAAATTTCGGAATTCAGTAAGAGAGTCATCCTAGCTG
ATGCCAATCTGGACAAAGTATTAAGCGCATACAACAAGCACAGGGATAAA
CCCATACGTGAGCAGGCGGAAAATATTATCCATTTGTTTACTCTTACCAA
CCTCGGCGCTCCAGCCGCATTCAAGTATTTTGACACAACGATAGATCGCA
AACGATACACTTCTACCAAGGAGGTGCTAGACGCGACACTGATTCACCAA
TCCATCACGGGATTATATGAAACTCGGATAGATTTGTCACAGCTTGGGGG
TGACGGATCCCCCAAGAAGAAGAGGAAAGTCTCGAGCGACTACAAAGACC
ATGACGGTGATTATAAAGATCATGACATCGATTACAAGGATGACGATGAC
AAGGCTGCAGGA
(SEQ ID NO: 682)
MDKKYSIGLAIGTNSVGWAVITDEYKVPSKKFKVLGNTDRHSIKKNLIGA
LLFDSGETAEATRLKRTARRRYTRRKNRICYLQEIFSNEMAKVDDSFFHR
LEESFLVEEDKKHERHPIFGNIVDEVAYHEKYPTIYHLRKKLVDSTDKAD
LRLIYLALAHMIKFRGHFLIEGDLNPDNSDVDKLFIQLVQTYNQLFEENP
INASGVDAKAILSARLSKSRRLENLIAQLPGEKKNGLFGNLIALSLGLTP
NFKSNFDLAEDAKLQLSKDTYDDDLDNLLAQIGDQYADLFLAAKNLSDAI
LLSDILRVNTEITKAPLSASMIKRYDEHHQDLTLLKALVRQQLPEKYKEI
FFDQSKNGYAGYIDGGASQEEFYKFIKPILEKMDGTEELLVKLNREDLLR
KQRTFDNGSIPHQIHLGELHAILRRQEDFYPFLKDNREKIEKILTFRIPY
YVGPLARGNSRFAWMTRKSEETITPWNFEEVVDKGASAQSFIERMTNFDK
NLPNEKVLPKHSLLYEYFTVYNELTKVKYVTEGMRKPAFLSGEQKKAIVD
LLFKTNRKVTVKQLKEDYFKKIECFDSVEISGVEDRFNASLGTYHDLLKI
IKDKDFLDNEENEDILEDIVLTLTLFEDREMIEERLKTYAHLFDDKVMKQ
LKRRRYTGWGRLSRKLINGIRDKQSGKTILDFLKSDGFANRNFMQLIHDD
SLTFKEDIQKAQVSGQGDSLHEHIANLAGSPAIKKGILQTVKVVDELVKV
MGRHKPENIVIEMARENQTTQKGQKNSRERMKRIEEGIKELGSQILKEHP
VENTQLQNEKLYLYYLQNGRDMYVDQELDINRLSDYDVDHIVPQSFLKDD
SIDNKVLTRSDKNRGKSDNVPSEEVVKKMKNYWRQLLNAKLITQRKFDNL
TKAERGGLSELDKAGFIKRQLVETRQITKHVAQILDSRMNTKYDENDKLI
REVKVITLKSKLVSDFRKDFQFYKVREINNYHHAHDAYLNAVVGTALIKK
YPKLESEFVYGDYKVYDVRKMIAKSEQEIGKATAKYFFYSNIMNFFKTEI
TLANGEIRKRPLIETNGETGEIVWDKGRDFATVRKVLSMPQVNIVKKTEV
QTGGFSKESILPKRNSDKLIARKKDWDPKKYGGFDSPTVAYSVLVVAKVE
KGKSKKLKSVKELLGITIMERSSFEKNPIDFLEAKGYKEVKKDLIIKLPK
YSLFELENGRKRMLASAGELQKGNELALPSKYVNFLYLASHYEKLKGSPE
DNEQKQLFVEQHKHYLDEIIEQISEFSKRVILADANLDKVLSAYNKHRDK
PIREQAENIIHLFTLTNLGAPAAFKYFDTTIDRKRYTSTKEVLDATLIHQ
SITGLYETRIDLSQLGGD (single underline: HNH domain;
double underline: RuvC domain)

[0078] In some embodiments, Cas9 refers to Cas9 from: Corynebacterium ulcerans (NCBI Refs: NC_015683.1, NC_017317.1); Corynebacterium diphtheria (NCBI Refs: NC_016782.1. NC_016786.1); Spiroplasma syrphidicola (NCBI Ref: NC_021284.1); Prevotella intermedia (NCBI Ref: NC_017861.1); Spiroplasma taiwanense (NCBI Ref: NC_021846.1); Streptococcus iniae (NCBI Ref: NC_021314.1); Belliella baltica (NCBI Ref: NC_018010.1); Psychroflexus torquisl (NCBI Ref: NC_018721.1); Streptococcus thermophilus (NCBI Ref: YP_820832.1), Listeria innocua (NCBI Ref: NP_472073.1), Campylobacter jejuni (NCBI Ref: YP_002344900.1) or Neisseria, meningitidis (NCBI Ref: YP_002342100.1) or to a Cas9 from any of the organisms listed in Example 1 (SEQ ID NOs: 1-260, 270-292 or 315-323).

[0079] In some embodiments, proteins comprising fragments of Cas9 are provided. For example, in some embodiments, a protein comprises one of two Cas9 domains: (1) the gRNA binding domain of Cas9; or (2) the DNA cleavage domain of Cas9. In some embodiments, proteins comprising Cas9 or fragments thereof are referred to as “Cas9 variants.” A Cas9 variant shares homology to Cas9, or a fragment thereof. For example, a Cas9 variant is at least about 70% identical, at least about 80% identical, at least about 90% identical, at least about 95% identical, at least about 96% identical, at least about 97% identical, at least about 98% identical, at least about 99% identical, at least about 99.5% identical, or at least about 99.9% identical to wild type Cas9. In some embodiments, the Cas9 variant may have 1, 2, 3, 4, 5, 6, 7, 8, 9, 10, 11, 12, 13, 14, 15, 16, 17, 18, 19, 20, 21, 22, 21, 24, 25, 26, 27, 28, 29, 30, 31, 32, 33, 34, 35, 36, 37, 38, 39, 40, 41, 42, 43, 44, 45, 46, 47, 48, 49, 50 or more amino acid changes compared to wild type Cas9. In some embodiments, the Cas9 variant comprises a fragment of Cas9 (e.g., a gRNA binding domain or a DNA-cleavage domain), such that the fragment is at least about 70% identical, at least about 80% identical, at least about 90% identical, at least about 95% identical, at least about 96% identical, at least about 97% identical, at least about 98% identical, at least about 99% identical, at least about 99.5% identical, or at least about 99.9% identical to the corresponding fragment of wild type Cas9. In some embodiments, the fragment is is at least 30%, at least 35%, at least 40%, at least 45%, at least 50%, at least 55%, at least 60%, at least 65%, at least 70%, at least 75%, at least 80%, at least 85%, at least 90%, at least 95% identical, at least 96%, at least 97%, at least 98%, at least 99%, or at least 99.5% of the amino acid length of a corresponding wild type Cas9.

[0080] In some embodiments, the fragment is at least 100 amino acids in length. In some embodiments, the fragment is at least 100, at least 150, at least 200, at least 250, at least 300, at least 350, at least 400, at least 450, at least 500, at least 550, at least 600, at least 650, at least 700, at least 750, at least 800, at least 850, at least 900, at least 950, at least 1000, at least 1050, at least 1100, at least 1150, at least 1200, at least 1250, or at least 1300 amino acids in length.

[0081] To be used as in the fusion protein of the present disclosure as the guide nucleotide sequence-programmable DNA binding protein domain, a Cas9 protein typically needs to be nuclease inactive. A nuclease-inactive Cas9 protein may interchangeably be referred to as a “dCas9” protein (for nuclease-“dead” Cas9). Methods for generating a Cas9 protein (or a fragment thereof) having an inactive DNA cleavage domain are known (See, e.g., Jinek et al., Science. 337:816-821(2012); Qi et al., (2013) Cell. 28; 152(5):1173-83, which is incorporated herein by reference). For example, the DNA cleavage domain of Cas9 is known to include two subdomains, the HNH nuclease subdomain and the RuvC1 subdomain. The HNK subdomain cleaves the strand complementary to the gRNA, whereas the RuvC1 subdomain cleaves the non-complementary strand. Mutations within these subdomains can silence the nuclease activity of Cas9. For example, the mutations D10A and H840A completely inactivate the nuclease activity of S. pyogenes Cas9 (Jinek et al., Science. 337:816-821(2012); Qi et al., Cell. 28; 152(5):1173-83 (2013)).

S. pyogenes dCas9 (D10A and H840A)

(SEQ ID NO: 2)
MDKKYSIGLAIGTNSVGWAVITDEYKVPSKKFKVLGNTDRHSIKKNLIGA
LLFDSGETAEATRLKRTARRRYTRRKNRICYLQEIFSNEMAKVDDSFFHR
LEESFLVEEDKKHERHPIFGNIVDEVAYHEKYPTIYHLRKKLVDSTDKAD
LRLIYLALAHMIKFRGHFLIEGDLNPDNSDVDKLFIQLVQTYNQLFEENP
INASGVDAKAILSARLSKSRRLENLIAQLPGEKKNGLFGNLIALSLGLTP
NFKSNFDLAEDAKLQLSKDTYDDDLDNLLAQIGDQYADLFLAAKNLSDAI
LLSDILRVNTEITKAPLSASMIKRYDEHHQDLTLLKALVRQQLPEKYKEI
FFDQSKNGYAGYIDGGASQLEFYKFIKPILEKMDGTEELLVKLNREDLLR
KQRTFDNGSIPHQIHLGELHAILRRQEDFYPFLKDNREKIEKILTFRIPY
YVGPLARGNSRFAWMTRKSEETITPWNFEEVVDKGASAQSFIERMTNFDK
NLPNEKVLPKHSLLYEYFTVYNELTKVKYVTEGMRKPAFLSGEQKKAIVD
LLFKTNRKVTVKQLKEDYFKKIECFDSVEISGVEDRFNASLGTYHDLLKI
IKDKDFLDNEENEDILEDIVLTLTLPEDREMIEERLKTYAHLFDDKVMKQ
LKRRRYTGWGRLSRKLINGIRDKQSGKTILDFLKSDGFANRNFMQLIHDD
SLTFKEDIQKAQVSGQGDSLHEHIANLAGSPAIKKGILQTVKVVDELVKV
MGRHKPENIVIEMARENQTTQKGQKNSRERMKRIEEGIKELGSQILKEHP
VENTQLQNEKLYLYYLQNGRDMYVDQELDINRLSDYDVDAIVPQSFLKDD
SIDNKVLTRSDKNRGKSDNVPSEEVVKKMKNYWRQLLNAKLITQRKFDNL
TKAERGGLSELDKAGFIKRQLVETRQITKHVAQILDSRMNTKYDENDKLI
REVKVITLKSKLVSDFRKDFQFYKVREINNYHHAHDAYLNAVVGTALIKK
YPKLESEFVYGDYKVYDVRKMIAKSEQEIGKATAKYFFYSNIMNFFKTEI
TLANGEIRKRPLIETNGETGEIVWDKGRDFATVRKVLSMPQVNIVKKTEV
QTGGFSKESILPKRNSDKLIARKKDWDPKKYGGFDSPTVAYSVLVVAKVE
KGKSKKLKSVKELLGITIMERSSFEKNPIDFLEAKGYKEVKKDLIIKLPK
YSLFELENGRKRMLASAGELQKGNELALPSKYVNFLYLASHYEKLKGSPE
DNEQKQLFVEQHKHYLDEIIEQISEFSKRVILADANLDKVLSAYNKHRDK
PIREQAENIIHLFTLTNLGAPAAFKYFDTTIDRKRYTSTKEVLDATLIHQ
SITGLYETRI (single underline: HNH domain; double
underline: RuvC domain).

[0082] The dCas9 of the present disclosure encompasses completely inactive Cas9 or partially inactive Cas9. For example, the dCas9 may have one of the two nuclease domain inactivated, while the other nuclease domain remains active. Such a partially active Cas9 may also be referred to as a Cas9 nickase, due to its ability to cleave one strand of the targeted DNA sequence. The Cas9 nickase suitable for use in accordance with the present disclosure has an active HNH domain and an inactive RuvC domain and is able to cleave only the strand of the target DNA that is bound by the sgRNA (which is the opposite strand of the strand that is being edited via deamination). The Cas9 nickase of the present disclosure may comprise mutations that inactivate the RuvC domain, e.g., a D10A mutation. It is to be understood that any mutation that inactivates the RuvC domain may be included in a Cas9 nickase, e.g., insertion, deletion, or single or multiple amino acid substitution in the RuvC domain. In a Cas9 nickase described herein, while the RuvC domain is inactivated, the HNH domain remains active. Thus, while the Cas9 nickase may comprise mutations other than those that inactivate the RuvC domain (e.g., D10A), those mutations do not affect the activity of the HNH domain. In a non-limiting Cas9 nickase example, the histidine at position 840 remains unchanged. The sequence of exemplary Cas9 nickases suitable for the present disclosure is provided below.

S. pyogenes Cas9 Nickase (D10A)

(SEQ ID NO: 3)
MDKKYSIGLAIGTNSVGWAVITDEYKVPSKKFKVLGNTDRHSIKKNLIGA
LLFDSGETAEATRLKRTARRRYTRRKNRICYLQEIFSNEMAKVDDSFFHR
LEESFLVEEDKKHERHPIFGNIVDEVAYHEKYPTIYHLRKKLVDSTDKAD
LRLIYLALAHMIKFRGHFLIEGDLNPDNSDVDKLFIQLVQTYNQLFEENP
INASGVDAKAILSARLSKSRRLENLIAQLPGEKKNGLFGNLIALSLGLTP
NFKSNFDLAEDAKLQLSKDTYDDDLDNLLAQIGDQYADLFLAAKNLSDAI
LLSDILRVNTEITKAPLSASMIKRYDEHHQDLTLLKALVRQQLPEKYKEI
FFDQSKNGYAGYIDGGASQLEFYKFIKPILEKMDGTEELLVKLNREDLLR
KQRTFDNGSIPHQIHLGELHAILRRQEDFYPFLKDNREKIEKILTFRIPY
YVGPLARGNSRFAWMTRKSEETITPWNFEEVVDKGASAQSFIERMTNFDK
NLPNEKVLPKHSLLYEYFTVYNELTKVKYVTEGMRKPAFLSGEQKKAIVD
LLFKTNRKVTVKQLKEDYFKKIECFDSVEISGVEDRFNASLGTYHDLLKI
IKDKDFLDNEENEDILEDIVLTLTLPEDREMIEERLKTYAHLFDDKVMKQ
LKRRRYTGWGRLSRKLINGIRDKQSGKTILDFLKSDGFANRNFMQLIHDD
SLTFKEDIQKAQVSGQGDSLHEHIANLAGSPAIKKGILQTVKVVDELVKV
MGRHKPENIVIEMARENQTTQKGQKNSRERMKRIEEGIKELGSQILKEHP
VENTQLQNEKLYLYYLQNGRDMYVDQELDINRLSDYDVDHIVPQSFLKDD
SIDNKVLTRSDKNRGKSDNVPSEEVVKKMKNYWRQLLNAKLITQRKFDNL
TKAERGGLSELDKAGFIKRQLVETRQITKHVAQILDSRMNTKYDENDKLI
REVKVITLKSKLVSDFRKDFQFYKVREINNYHHAHDAYLNAVVGTALIKK
YPKLESEFVYGDYKVYDVRKMIAKSEQEIGKATAKYFFYSNIMNFFKTEI
TLANGEIRKRPLIETNGETGEIVWDKGRDFATVRKVLSMPQVNIVKKTEV
QTGGFSKESILPKRNSDKLIARKKDWDPKKYGGFDSPTVAYSVLVVAKVE
KGKSKKLKSVKELLGITIMERSSFEKNPIDFLEAKGYKEVKKDLIIKLPK
YSLFELENGRKRMLASAGELQKGNELALPSKYVNFLYLASHYEKLKGSPE
DNEQKQLFVEQHKHYLDEIIEQISEFSKRVILADANLDKVLSAYNKHRDK
PIREQAENIIHLFTLTNLGAPAAFKYFDTTIDRKRYTSTKEVLDATLIHQ
SITGLYETRIDLSQLGGD (single underline: HNH domain;
double underline: RuvC domain)

S. aureus Cas9 Nickase (D10A)

(SEQ ID NO: 6)
MKRNYILGLDIGITSVGYGIIDYETRDVIDAGVRLFKEANVENNEGRRSK
RGARRLKRRRRHRIQRVKKLLFDYNLLTDHSELSGINPYEARVKGLSQKL
SEEEFSAALLHLAKRRGVHNVNEVEEDTGNELSTKEQISRNSKALEEKYV
AELQLERLKKDGEVRGSINRFKTSDYVKLAKQLLKVQKAYHQLDQSFIDT
YIDLLETRRTYYEGPGEGSPFGWKDIKEWYEMLMGHCTYFPEELRSVKYA
YNADLYNALNDLNNLVITRDENEKLEYYEKFQIIENVFKQKKKPTLKQIA
KEILVNEEDIKGYRVTSTGKPEFTNLKVYHDIKDITARKEIIENAELLDQ
IAKILTIYQSSEDIQEELTNLNSELTQLEIEQISNLKGYTGTHNLSLKAI
NLILDELWHTNDNQIAIFNRLKLVPKKVDLSQQKEIPTTLVDDFILSPVV
KRSFIQSIKVINAIIKKYGLPNDIIIELAREKNSKDAQKMINEMQKRNRQ
TNERIEEIIRTTGKENAKYLIEKIKLHDMQEGKCLYSLEAIPLEDLLNNP
FNYEVDHIIPRSVSFDNSFNNKVLVKQEENSKKGNRTPFQYLSSSDSKIS
YETFKKHILNLAKGKGRISKTKKEYLLEERDINRFSVQKDFINRNLVDTR
YATRGLMNLLRSYFRVNNLDVKVKSINGGFTSFLRRKWKFKKERNKGYKH
HAEDALIIANADFIFKEWKKLDKAKKVMENQMFEEKQAESMPEIETEQEY
KEIFITPHQIKHIKDFKDYKYSHRVDKKPNRELINDTLYSTRKDDKGNTL
IVNNLNGLYDKDNDKLKKLINKSPEKLLMYHHDPQTYQKLKLIMEQYGDE
KNPLYKYYEETGNYLTKYSKKDNGPVIKKIKYYGNKLNAHLDITDDYPNS
RNKVVKLSLKPYRFDVYLDNGVYKFVTVKNLDVIKKENYYEVNSKCYEEA
KKEKKISNQAEFIASFYNNDLIKINGELYRVIGVNNDLLNRIEVNMIDIT
YREYLENMNDKRPPRIIKTIASKTQSIKKYSTDILGNLYEVKSKKHPQII
KKG

[0083] The targeting range of base editors was further expanded by applying recently engineered Cas9 variants that expand or alter PAM specificities. Joung and coworkers recently reported three SpCas9 mutants that accept NGA (VQR-Cas9), NGAG (EQR-Cas9), or NGCG(VRER-Cas9) PAM sequences (see: Kleinstiver. B. P. et al. Engineered CRISPR-Cas9 nucleases with altered PAM specificities. Nature 523, 481-485; 2015, which is herein incorporated by reference in its entirety). In addition. Joung and coworkers engineered a SaCas9 variant containing three mutations (SaKKH-Cas9) that relax its PAM requirement to NNNRRT (see: Kleinstiver, B. P. et al. Broadening the targeting range of Staphylococcus aureus CRISPR-Cas9 by modifying PAM recognition. Nat. Biotechnol. 33, 1293-1298; 2015, which is herein incorporated by reference in its entirety).

VRER-Cas9 (D1135V/G1218R/R1335E/T1337R) S. pyogenes Cas9

(SEQ ID NO: 7)
MDKKYSIGLDIGTNSVGWAVITDEYKVPSKKFKVLGNTDRHSIKKNLIGA
LLFDSGETAEATRLKRTARRRYTRRKNRICYLQEIFSNEMAKVDDSFFHR
LEESFLVEEDKKHERHPIFGNIVDEVAYHEKYPTIYHLRKKLVDSTDKAD
LRLIYLALAHMIKFRGHFLIEGDLNPDNSDVDKLFIQLVQTYNQLFEENP
INASGVDAKAILSARLSKSRRLENLIAQLPGEKKNGLFGNLIALSLGLTP
NFKSNFDLAEDAKLQLSKDTYDDDLDNLLAQIGDQYADLFLAAKNLSDAI
LLSDILRVNTEITKAPLSASMIKRYDEHHQDLTLLKALVRQQLPEKYKEI
FFDQSKNGYAGYIDGGASQLEFYKFIKPILEKMDGTEELLVKLNREDLLR
KQRTFDNGSIPHQIHLGELHAILRRQEDFYPFLKDNREKIEKILTFRIPY
YVGPLARGNSRFAWMTRKSEETITPWNFEEVVDKGASAQSFIERMTNFDK
NLPNEKVLPKHSLLYEYFTVYNELTKVKYVTEGMRKPAFLSGEQKKAIVD
LLFKTNRKVTVKQLKEDYFKKIECFDSVEISGVEDRFNASLGTYHDLLKI
IKDKDFLDNEENEDILEDIVLTLTLPEDREMIEERLKTYAHLFDDKVMKQ
LKRRRYTGWGRLSRKLINGIRDKQSGKTILDFLKSDGFANRNFMQLIHDD
SLTFKEDIQKAQVSGQGDSLHEHIANLAGSPAIKKGILQTVKVVDELVKV
MGRHKPENIVIEMARENQTTQKGQKNSRERMKRIEEGIKELGSQILKEHP
VENTQLQNEKLYLYYLQNGRDMYVDQELDINRLSDYDVDHIVPQSFLKDD
SIDNKVLTRSDKNRGKSDNVPSEEVVKKMKNYWRQLLNAKLITQRKFDNL
TKAERGGLSELDKAGFIKRQLVETRQITKHVAQILDSRMNTKYDENDKLI
REVKVITLKSKLVSDFRKDFQFYKVREINNYHHAHDAYLNAVVGTALIKK
YPKLESEFVYGDYKVYDVRKMIAKSEQEIGKATAKYFFYSNIMNFFKTEI
TLANGEIRKRPLIETNGETGEIVWDKGRDFATVRKVLSMPQVNIVKKTEV
QTGGFSKESILPKRNSDKLIARKKDWDPKKYGGFVSPTVAYSVLVVAKVE
KGKSKKLKSVKELLGITIMERSSFEKNPIDFLEAKGYKEVKKDLIIKLPK
YSLFELENGRKRMLASARELQKGNELALPSKYVNFLYLASHYEKLKGSPE
DNEQKQLFVEQHKHYLDEIIEQISEFSKRVILADANLDKVLSAYNKHRDK
PIREQAENIIHLFTLTNLGAPAAFKYFDTTIDRKEYRSTKEVLDATLIHQ
SITGLYETRIDLSQLGGD (single underline: HNH domain;
double underline: RuvC domain)

VRER-nCas9 (D10A/D1135V/G1218R/R1335E/T1337R) S. pyogenes Cas9Nickase

(SEQ ID NO: 8)
MDKKYSIGLAIGTNSVGWAVITDEYKVPSKKEKVLGNTDRHSIKKNLIGA
LLEDSGETAEATRLKRTARRRYTRRKNRICYLQEIFSNEMAKVDDSFFHR
LEESFLVEEDKKHERHPIFGNIVDEVAYHEKYPTIYHLRKKLVDSTDKAD
LRLIYLALAHMIKFRGHFLIEGDLNPDNSDVDKLFIQLVQTYNQLFEENP
INASGVDAKAILSARLSKSRRLENLIAQLPGEKKNGLFGNLIALSLGLTP
NFKSNEDLAEDAKLQLSKDTYDDDLDNLLAQIGDQYADLFLAAKNLSDAI
LLSDILRVNTEITKAPLSASMIKRYDEHHQDLTLLKALVRQQLPEKYKEI
FFDQSKNGYAGYIDGGASQEEFYKFIKPILEKMDGTEELLVKLNREDLLR
KQRTFDNGSIPHQIHLGELHAILRRQEDFYPFLKDNREKIEKILTFRIPY
YVGPLARGNSRFAWMTRKSEETITPWNFEEVVDKGASAQSFIERMTNFDK
NLPNEKVLPKHSLLYEYFTVYNELTKVKYVTEGMRKPAFLSGEQKKAIVD
LLFKTNRKVTVKQLKEDYFKKIECFDSVEISGVEDRFNASLGTYHDLLKI
IKDKDELDNEENEDILEDIVLTLTLFEDREMIEERLKTYAHLEDDKVMKQ
LKRRRYTGWGRLSRKLINGIRDKQSGKTILDFLKSDGFANRNFMQLIHDD
SLTFKEDIQKAQVSGQGDSLHEHIANLAGSPAIKKGILQTVKVVDELVKV
MGRHKPENIVIEMARENQTTQKGQKNSRERMKRILEGIKELGSQILKEHP
VENTQLQNEKLYLYYLQNGRDMYVDQELDINRLSDYDVDHIVPQSFLKDD
SIDNKVLTRSDKNRGKSDNVPSEEVVKKMKNYWRQLLNAKLITQRKFDNL
TKAERGGLSELDKAGFIKRQLVETRQITKHVAQILDSRMNTKYDENDKLI
REVKVITLKSKLVSDERKDFQFYKVREINNYHHAHDAYLNAVVGTALIKK
YPKLESEFVYGDYKVYDVRKMIAKSEQFIGKATAKYFFYSNIMNFFKTEI
TLANGEIRKRPLIETNGETGEIVWDKGRDEATVRKVLSMPQVNIVKKTEV
QTGGFSKESILPKRNSDKLIARKKDWDPKKYGGFVSPTVAYSVLVVAKVE
KGKSKKLKSVKELLGITIMERSSFEKNPIDFLEAKGYKEVKKDLIIKLPK
YSLFELENGRKRMLASARELQKGNELALPSKYVNFLYLASHYEKLKGSPE
DNEQKQLFVEQHKHYLDEIIEQISEFSKRVILADANLDKVLSAYNKHRDK
PIREQAENIIHLFTLTNLGAPAAFKYFDTTIDRKEYRSTKEVLDATLIHQ
SITGLYETRIDLSQLGGD (single underline: HNH domain;
double underline: RuvC domain)

VQR-Cas9 (D1135V/R1335Q/T1337R) S. pyogenes Cas9

(SEQ ID NO: 9)
MDKKYSIGLDIGTNSVGWAVITDEYKVPSKKFKVLGNTDRHSIKKNLIGA
LLFDSGETAEATRLKRTARRRYTRRKNRICYLQEIFSNEMAKVDDSFFHR
LEESFLVEEDKKHERHPIFGNIVDEVAYHEKYPTIYHLRKKLVDSTDKAD
LRLIYLALAHMIKFRGHFLIEGDLNPDNSDVDKLFIQLVQTYNQLFEENP
INASGVDAKAILSARLSKSRRLENLIAQLPGEKKNGLFGNLIALSLGLTP
NFKSNFDLAEDAKLQLSKDTYDDDLDNLLAQIGDQYADLFLAAKNLSDAI
LLSDILRVNTEITKAPLSASMIKRYDEHHQDLTLLKALVRQQLPEKYKEI
FFDQSKNGYAGYIDGGASQLEFYKFIKPILEKMDGTEELLVKLNREDLLR
KQRTFDNGSIPHQIHLGELHAILRRQEDFYPFLKDNREKIEKILTFRIPY
YVGPLARGNSRFAWMTRKSEETITPWNFEEVVDKGASAQSFIERMTNFDK
NLPNEKVLPKHSLLYEYFTVYNELTKVKYVTEGMRKPAFLSGEQKKAIVD
LLFKTNRKVTVKQLKEDYFKKIECFDSVEISGVEDRFNASLGTYHDLLKI
IKDKDFLDNEENEDILEDIVLTLTLPEDREMIEERLKTYAHLFDDKVMKQ
LKRRRYTGWGRLSRKLINGIRDKQSGKTILDFLKSDGFANRNFMQLIHDD
SLTFKEDIQKAQVSGQGDSLHEHIANLAGSPAIKKGILQTVKVVDELVKV
MGRHKPENIVIEMARENQTTQKGQKNSRERMKRIEEGIKELGSQILKEHP
VENTQLQNEKLYLYYLQNGRDMYVDQELDINRLSDYDVDHIVPQSFLKDD
SIDNKVLTRSDKNRGKSDNVPSEEVVKKMKNYWRQLLNAKLITQRKFDNL
TKAERGGLSELDKAGFIKRQLVETRQITKHVAQILDSRMNTKYDENDKLI
REVKVITLKSKLVSDFRKDFQFYKVREINNYHHAHDAYLNAVVGTALIKK
YPKLESEFVYGDYKVYDVRKMIAKSEQEIGKATAKYFFYSNIMNFFKTEI
TLANGEIRKRPLIETNGETGEIVWDKGRDFATVRKVLSMPQVNIVKKTEV
QTGGFSKESILPKRNSDKLIARKKDWDPKKYGGFVSPTVAYSVLVVAKVE
KGKSKKLKSVKELLGITIMERSSFEKNPIDFLEAKGYKEVKKDLIIKLPK
YSLFELENGRKRMLASAGELQKGNELALPSKYVNFLYLASHYEKLKGSPE
DNEQKQLFVEQHKHYLDEIIEQISEFSKRVILADANLDKVLSAYNKHRDK
PIREQAENIIHLFTLTNLGAPAAFKYFDTTIDRKQYRSTKEVLDATLIHQ
SITGLYETRIDLSQLGGD (single underline: HNH domain;
double underline: RuvC domain)

VQR-nCas9 (D10A/D1135V/R1335Q/T1337R) S. pyogenes Cas9 Nickase

(SEQ ID NO: 315)
MDKKYSIGLAIGTNSVGWAVITDEYKVPSKKFKVLGNTDRHSIKKNLIGA
LLFDSGETAEATRLKRTARRRYTRRKNRICYLQEIFSNEMAKVDDSFFHR
LEESFLVEEDKKHERHPIFGNIVDEVAYHEKYPTIYHLRKKLVDSTDKAD
LRLIYLALAHMIKFRGHFLIEGDLNPDNSDVDKLFIQLVQTYNQLFEENP
INASGVDAKAILSARLSKSRRLENLIAQLPGEKKNGLFGNLIALSLGLTP
NFKSNFDLAEDAKLQLSKDTYDDDLDNLLAQIGDQYADLFLAAKNLSDAI
LLSDILRVNTEITKAPLSASMIKRYDEHHQDLTLLKALVRQQLPEKYKEI
FFDQSKNGYAGYIDGGASQLEFYKFIKPILEKMDGTEELLVKLNREDLLR
KQRTFDNGSIPHQIHLGELHAILRRQEDFYPFLKDNREKIEKILTFRIPY
YVGPLARGNSRFAWMTRKSEETITPWNFEEVVDKGASAQSFIERMTNFDK
NLPNEKVLPKHSLLYEYFTVYNELTKVKYVTEGMRKPAFLSGEQKKAIVD
LLFKTNRKVTVKQLKEDYFKKIECFDSVEISGVEDRFNASLGTYHDLLKI
IKDKDFLDNEENEDILEDIVLTLTLPEDREMIEERLKTYAHLFDDKVMKQ
LKRRRYTGWGRLSRKLINGIRDKQSGKTILDFLKSDGFANRNFMQLIHDD
SLTFKEDIQKAQVSGQGDSLHEHIANLAGSPAIKKGILQTVKVVDELVKV
MGRHKPENIVIEMARENQTTQKGQKNSRERMKRIEEGIKELGSQILKEHP
VENTQLQNEKLYLYYLQNGRDMYVDQELDINRLSDYDVDHIVPQSFLKDD
SIDNKVLTRSDKNRGKSDNVPSEEVVKKMKNYWRQLLNAKLITQRKFDNL
TKAERGGLSELDKAGFIKRQLVETRQITKHVAQILDSRMNTKYDENDKLI
REVKVITLKSKLVSDFRKDFQFYKVREINNYHHAHDAYLNAVVGTALIKK
YPKLESEFVYGDYKVYDVRKMIAKSEQEIGKATAKYFFYSNIMNFFKTEI
TLANGEIRKRPLIETNGETGEIVWDKGRDFATVRKVLSMPQVNIVKKTEV
QTGGFSKESILPKRNSDKLIARKKDWDPKKYGGFVSPTVAYSVLVVAKVE
KGKSKKLKSVKELLGITIMERSSFEKNPIDFLEAKGYKEVKKDLIIKLPK
YSLFELENGRKRMLASAGELQKGNELALPSKYVNFLYLASHYEKLKGSPE
DNEQKQLFVEQHKHYLDEIIEQISEFSKRVILADANLDKVLSAYNKHRDK
PIREQAENIIHLFTLTNLGAPAAFKYFDTTIDRKQYRSTKEVLDATLIHQ
SITGLYETRIDLSQLGGD (single underline: HNH domain;
double underline: RuvC domain)

EQR-Cas9 (D1135E/R1335Q/T1337R) S. pyogenes Cas9

(SEQ ID NO: 316)
MDKKYSIGLDIGTNSVGWAVITDEYKVPSKKFKVLGNTDRHSIKKNLIGA
LLFDSGETAEATRLKRTARRRYTRRKNRICYLQEIFSNEMAKVDDSFFHR
LEESFLVEEDKKHERHPIFGNIVDEVAYHEKYPTIYHLRKKLVDSTDKAD
LRLIYLALAHMIKFRGHFLIEGDLNPDNSDVDKLFIQLVQTYNQLFEENP
INASGVDAKAILSARLSKSRRLENLIAQLPGEKKNGLFGNLIALSLGLTP
NFKSNFDLAEDAKLQLSKDTYDDDLDNLLAQIGDQYADLFLAAKNLSDAI
LLSDILRVNTEITKAPLSASMIKRYDEHHQDLTLLKALVRQQLPEKYKEI
FFDQSKNGYAGYIDGGASQLEFYKFIKPILEKMDGTEELLVKLNREDLLR
KQRTFDNGSIPHQIHLGELHAILRRQEDFYPFLKDNREKIEKILTFRIPY
YVGPLARGNSRFAWMTRKSEETITPWNFEEVVDKGASAQSFIERMTNFDK
NLPNEKVLPKHSLLYEYFTVYNELTKVKYVTEGMRKPAFLSGEQKKAIVD
LLFKTNRKVTVKQLKEDYFKKIECFDSVEISGVEDRFNASLGTYHDLLKI
IKDKDFLDNEENEDILEDIVLTLTLPEDREMIEERLKTYAHLFDDKVMKQ
LKRRRYTGWGRLSRKLINGIRDKQSGKTILDFLKSDGFANRNFMQLIHDD
SLTFKEDIQKAQVSGQGDSLHEHIANLAGSPAIKKGILQTVKVVDELVKV
MGRHKPENIVIEMARENQTTQKGQKNSRERMKRIEEGIKELGSQILKEHP
VENTQLQNEKLYLYYLQNGRDMYVDQELDINRLSDYDVDHIVPQSFLKDD
SIDNKVLTRSDKNRGKSDNVPSEEVVKKMKNYWRQLLNAKLITQRKFDNL
TKAERGGLSELDKAGFIKRQLVETRQITKHVAQILDSRMNTKYDENDKLI
REVKVITLKSKLVSDFRKDFQFYKVREINNYHHAHDAYLNAVVGTALIKK
YPKLESEFVYGDYKVYDVRKMIAKSEQEIGKATAKYFFYSNIMNFFKTEI
TLANGEIRKRPLIETNGETGEIVWDKGRDFATVRKVLSMPQVNIVKKTEV
QTGGFSKESILPKRNSDKLIARKKDWDPKKYGGFESPTVAYSVLVVAKVE
KGKSKKLKSVKELLGITIMERSSFEKNPIDFLEAKGYKEVKKDLIIKLPK
YSLFELENGRKRMLASAGELQKGNELALPSKYVNFLYLASHYEKLKGSPE
DNEQKQLFVEQHKHYLDEIIEQISEFSKRVILADANLDKVLSAYNKHRDK
PIREQAENIIHLFTLTNLGAPAAFKYFDTTIDRKQYRSTKEVLDATLIHQ
SITGLYETRIDLSQLGGD (single underline: HNH domain;
double underline: RuvC domain)

EQR-nCas9 (D10A/D1135E/R1335Q/T1337R) S. pyogenes Cas9 Nickase

(SEQ ID NO: 317)
MDKKYSIGLAIGTNSVGWAVITDEYKVPSKKFKVLGNTDRHSIKKNLIGA
LLFDSGETAEATRLKRTARRRYTRRKNRICYLQEIFSNEMAKVDDSFFHR
LEESFLVEEDKKHERHPIFGNIVDEVAYHEKYPTIYHLRKKLVDSTDKAD
LRLIYLALAHMIKFRGHFLIEGDLNPDNSDVDKLFIQLVQTYNQLFEENP
INASGVDAKAILSARLSKSRRLENLIAQLPGEKKNGLFGNLIALSLGLTP
NFKSNFDLAEDAKLQLSKDTYDDDLDNLLAQIGDQYADLFLAAKNLSDAI
LLSDILRVNTEITKAPLSASMIKRYDEHHQDLTLLKALVRQQLPEKYKEI
FFDQSKNGYAGYIDGGASQLEFYKFIKPILEKMDGTEELLVKLNREDLLR
KQRTFDNGSIPHQIHLGELHAILRRQEDFYPFLKDNREKIEKILTFRIPY
YVGPLARGNSRFAWMTRKSEETITPWNFEEVVDKGASAQSFIERMTNFDK
NLPNEKVLPKHSLLYEYFTVYNELTKVKYVTEGMRKPAFLSGEQKKAIVD
LLFKTNRKVTVKQLKEDYFKKIECFDSVEISGVEDRFNASLGTYHDLLKI
IKDKDFLDNEENEDILEDIVLTLTLPEDREMIEERLKTYAHLFDDKVMKQ
LKRRRYTGWGRLSRKLINGIRDKQSGKTILDFLKSDGFANRNFMQLIHDD
SLTFKEDIQKAQVSGQGDSLHEHIANLAGSPAIKKGILQTVKVVDELVKV
MGRHKPENIVIEMARENQTTQKGQKNSRERMKRIEEGIKELGSQILKEHP
VENTQLQNEKLYLYYLQNGRDMYVDQELDINRLSDYDVDHIVPQSFLKDD
SIDNKVLTRSDKNRGKSDNVPSEEVVKKMKNYWRQLLNAKLITQRKFDNL
TKAERGGLSELDKAGFIKRQLVETRQITKHVAQILDSRMNTKYDENDKLI
REVKVITLKSKLVSDFRKDFQFYKVREINNYHHAHDAYLNAVVGTALIKK
YPKLESEFVYGDYKVYDVRKMIAKSEQEIGKATAKYFFYSNIMNFFKTEI
TLANGEIRKRPLIETNGETGEIVWDKGRDFATVRKVLSMPQVNIVKKTEV
QTGGFSKESILPKRNSDKLIARKKDWDPKKYGGFESPTVAYSVLVVAKVE
KGKSKKLKSVKELLGITIMERSSFEKNPIDFLEAKGYKEVKKDLIIKLPK
YSLFELENGRKRMLASAGELQKGNELALPSKYVNFLYLASHYEKLKGSPE
DNEQKQLFVEQHKHYLDEIIEQISEFSKRVILADANLDKVLSAYNKHRDK
PIREQAENIIHLFTLTNLGAPAAFKYFDTTIDRKQYRSTKEVLDATLIHQ
SITGLYETRIDLSQLGGD (single underline: HNH domain;
double underline: RuvC domain)

[0084] Further variants of Cas9 from S. aureus and S. thermophilius may also be used in the contemplated methods and compositions described herein.

KKH Variant (E782K/N968K/R1015H) S. aureus Cas9

(SEQ ID NO: 318)
MKRNYILGLDIGITSVGYGIIDYETRDVIDAGVRLFKEANVENNEGRRSK
RGARRLKRRRRHRIQRVKKLLFDYNLLTDHSELSGINPYEARVKGLSQKL
SEEEFSAALLHLAKRRGVHNVNEVEEDTGNELSTKEQISRNSKALEEKYV
AELQLERLKKDGEVRGSINRFKTSDYVKEAKQLLKVQKAYHQLDQSFIDT
YIDLLETRRTYYEGPGEGSPFGWKDIKEWYEMLMGHCTYFPEELRSVKYA
YNADLYNALNDLNNLVITRDENEKLEYYEKFQIIENVFKQKKKPTLKQIA
KEILVNEEDIKGYRVTSTGKPEFTNLKVYHDIKDITARKEIIENAELLDQ
IAKILTIYQSSEDIQEELTNLNSELTQEEIEQISNLKGYTGTHNLSLKAI
NLILDELWHTNDNQIAIFNRLKLVPKKVDLSQQKEIPTTLVDDFILSPVV
KRSFIQSIKVINAIIKKYGLPNDIIIELAREKNSKDAQKMINEMQKRNRQ
TNERIEEIIRTTGKENAKYLIEKIKLHDMQEGKCLYSLEAIPLEDLLNNP
FNYEVDHIIPRSVSFDNSFNNKVLVKQEENSKKGNRTPFQYLSSSDSKIS
YETFKKHILNLAKGKGRISKTKKEYLLEERDINRFSVQKDFINRNLVDTR
YATRGLMNLLRSYFRVNNLDVKVKSINGGFTSFLRRKWKFKKERNKGYKH
HAEDALIIANADFIFKEWKKLDKAKKVMENQMFEEKQAESMPEIETEQEY
KEIFITPHQIKHIKDFKDYKYSHRVDKKPNRKLINDTLYSTRKDDKGNTL
IVNNLNGLYDKDNDKLKKLINKSPEKLLMYHHDPQTYQKLKLIMEQYGDE
KNPLYKYYEETGNYLTKYSKKDNGPVIKKIKYYGNKLNAHLDITDDYPNS
RNKVVKLSLKPYRFDVYLDNGVYKFVTVKNLDVIKKENYYEVNSKCYEEA
KKLKKISNQAEFIASFYKNDLIKINGELYRVIGVNNDLLNRIEVNMIDIT
YREYLENMNDKRPPHIIKTIASKTQSIKKYSTDILGNLYEVKSKKHPQII
KKG

KKH Variant (D10A/E782K/N968K/R1015H) S. aureus Cas9 Nickase

(SEQ ID NO: 319)
MKRNYILGLAIGITSVGYGIIDYETRDVIDAGVRLFKEANVENNEGRRSK
RGARRLKRRRRHRIQRVKKLLFDYNLLTDHSELSGINPYEARVKGLSQKL
SEEEFSAALLHLAKRRGVHNVNEVEEDTGNELSTKEQISRNSKALEEKYV
AELQLERLKKDGEVRGSINRFKTSDYVKEAKQLLKVQKAYHQLDQSFIDT
YIDLLETRRTYYEGPGEGSPFGWKDIKEWYEMLMGHCTYFPEELRSVKYA
YNADLYNALNDLNNLVITRDENEKLEYYEKFQIIENVFKQKKKPTLKQIA
KEILVNEEDIKGYRVTSTGKPEFTNLKVYHDIKDITARKEIIENAELLDQ
IAKILTIYQSSEDIQEELTNLNSELTQEEIEQISNLKGYTGTHNLSLKAI
NLILDELWHTNDNQIAIFNRLKLVPKKVDLSQQKEIPTTLVDDFILSPVV
KRSFIQSIKVINAIIKKYGLPNDIIIELAREKNSKDAQKMINEMQKRNRQ
TNERIEEIIRTTGKENAKYLIEKIKLHDMQEGKCLYSLEAIPLEDLLNNP
FNYEVDHIIPRSVSFDNSFNNKVLVKQEENSKKGNRTPFQYLSSSDSKIS
YETFKKHILNLAKGKGRISKTKKEYLLEERDINRFSVQKDFINRNLVDTR
YATRGLMNLLRSYFRVNNLDVKVKSINGGFTSFLRRKWKFKKERNKGYKH
HAEDALIIANADFIFKEWKKLDKAKKVMENQMFEEKQAESMPEIETEQEY
KEIFITPHQIKHIKDFKDYKYSHRVDKKPNRKLINDTLYSTRKDDKGNTL
IVNNLNGLYDKDNDKLKKLINKSPEKLLMYHHDPQTYQKLKLIMEQYGDE
KNPLYKYYEETGNYLTKYSKKDNGPVIKKIKYYGNKLNAHLDITDDYPNS
RNKVVKLSLKPYRFDVYLDNGVYKFVTVKNLDVIKKENYYEVNSKCYEEA
KKLKKISNQAEFIASFYKNDLIKINGELYRVIGVNNDLLNRIEVNMIDIT
YREYLENMNDKRPPHIIKTIASKTQSIKKYSTDILGNLYEVKSKKHPQII
KKG

Streptococcus thermophilus CRISPR1 Cas9 (St1Cas9)

(SEQ ID NO: 320)
MSDLVLGLDIGIGSVGVGILNKVTGEIIHKNSRIFPAAQAENNLVRRTNR
QGRRLTRRKKHRRVRLNRLFEESGLITDFTKISINLNPYQLRVKGLTDEL
SNEELFIALKNMVKHRGISYLDDASDDGNSSIGDYAQIVKENSKQLETKT
PGQIQLERYQTYGQLRGDFTVEKDGKKHRLINVFPTSAYRSEALRILQTQ
QEFNPQITDEFINRYLEILTGKRKYYHGPGNEKSRTDYGRYRTSGETLDN
IFGILIGKCTFYPDEFRAAKASYTAQEFNLLNDLNNLTVPTETKKLSKEQ
KNQIINYVKNEKAMGPAKLFKYIAKLLSCDVADIKGYRIDKSGKAEIHTF
EAYRKMKTLETLDIEQMDRETLDKLAYVLTLNTEREGIQEALEHEFADGS
FSQKQVDELVQFRKANSSIFGKGWHNFSVKLMMELIPELYETSEEQMTIL
TRLGKQKTTSSSNKTKYIDEKLLTEEIYNPVVAKSVRQAIKIVNAAIKEY
GDFDNIVIEMARETNEDDEKKAIQKIQKANKDEKDAAMLKAANQYNGKAE
LPHSVFHGHKQLATKIRLWHQQGERCLYTGKTISIHDLINNSNQFEVDHI
LPLSITFDDSLANKVLVYATANQEKGQRTPYQALDSMDDAWSFRELKAFV
RESKTLSNKKKEYLLTEEDISKFDVRKKFIERNLVDTRYASRVVLNALQE
HFRAHKIDTKVSVVRGQFTSQLRRHWGIEKTRDTYHHHAVDALIIAASSQ
LNLWKKQKNTLVSYSEDQLLDIETGELISDDEYKESVFKAPYQHFVDTLK
SKEFEDSILFSYQVDSKFNRKISDATIYATRQAKVGKDKADETYVLGKIK
DIYTQDGYDAFMKIYKKDKSKFLMYRHDPQTFEKVIEPILENYPNKQINE
KGKEVPCNPFLKYKEEHGYIRKYSKKGNGPEIKSLKYYDSKLGNHIDITP
KDSNNKVVLQSVSPWRADVYFNKTTGKYEILGLKYADLQFEKGTGTYKIS
QEKYNDIKKKEGVDSDSEFKFTLYKNDLLLVKDTETKEQQLFRFLSRTMP
KQKHYVELKPYDKQKFEGGEALIKVLGNVANSGQCKKGLGKSNISIYKVR
TDVLGNQHIIKNEGDKPKLDF

Streptococcus thermophilus CRISPR1 Cas9 (St1Cas9) Nickase (D9A)

(SEQ ID NO: 321)
MSDLVLGLAIGIGSVGVGILNKVTGEIIHKNSRIFPAAQAENNLVRRTNR
QGRRLTRRKKHRRVRLNRLFEESGLITDFTKISINLNPYQLRVKGLTDEL
SNEELFIALKNMVKHRGISYLDDASDDGNSSIGDYAQIVKENSKQLETKT
PGQIQLERYQTYGQLRGDFTVEKDGKKHRLINVFPTSAYRSEALRILQTQ
QEFNPQITDEFINRYLEILTGKRKYYHGPGNEKSRTDYGRYRTSGETLDN
IFGILIGKCTFYPDEFRAAKASYTAQEFNLLNDLNNLTVPTETKKLSKEQ
KNQIINYVKNEKAMGPAKLFKYIAKLLSCDVADIKGYRIDKSGKAEIHTF
EAYRKMKTLETLDIEQMDRETLDKLAYVLTLNTEREGIQEALEHEFADGS
FSQKQVDELVQFRKANSSIFGKGWHNFSVKLMMELIPELYETSEEQMTIL
TRLGKQKTTSSSNKTKYIDEKLLTEEIYNPVVAKSVRQAIKIVNAAIKEY
GDFDNIVIEMARETNEDDEKKAIQKIQKANKDEKDAAMLKAANQYNGKAE
LPHSVFHGHKQLATKIRLWHQQGERCLYTGKTISIHDLINNSNQFEVDHI
LPLSITFDDSLANKVLVYATANQEKGQRTPYQALDSMDDAWSFRELKAFV
RESKTLSNKKKEYLLTEEDISKFDVRKKFIERNLVDTRYASRVVLNALQE
HFRAHKIDTKVSVVRGQFTSQLRRHWGIEKTRDTYHHHAVDALIIAASSQ
LNLWKKQKNTLVSYSEDQLLDIETGELISDDEYKESVFKAPYQHFVDTLK
SKEFEDSILFSYQVDSKFNRKISDATIYATRQAKVGKDKADETYVLGKIK
DIYTQDGYDAFMKIYKKDKSKFLMYRHDPQTFEKVIEPILENYPNKQINE
KGKEVPCNPFLKYKEEHGYIRKYSKKGNGPEIKSLKYYDSKLGNHIDITP
KDSNNKVVLQSVSPWRADVYFNKTTGKYEILGLKYADLQFEKGTGTYKIS
QEKYNDIKKKEGVDSDSEFKFTLYKNDLLLVKDTETKEQQLFRFLSRTMP
KQKHYVELKPYDKQKFEGGEALIKVLGNVANSGQCKKGLGKSNISIYKVR
TDVLGNQHIIKNEGDKPKLDF

Streptococcus thermophilus CRISPR3Cas9 (St3Cas9)

(SEQ ID NO: 322)
MTKPYSIGLDIGTNSVGWAVITDNYKVPSKKMKVLGNTSKKYIKKNLLGV
LLFDSGITAEGRRLKRTARRRYTRRRNRILYLQEIFSTEMATLDDAFFQR
LDDSFLVPDDKRDSKYPIFGNLVEEKVYHDEFPTIYHLRKYLADSTKKAD
LRLVYLALAHMIKYRGHFLIEGEFNSKNNDIQKNFQDFLDTYNAIFESDL
SLENSKQLEEIVKDKISKLEKKDRILKLFPGEKNSGIFSEFLKLIVGNQA
DFRKCFNLDEKASLHFSKESYDEDLETLLGYIGDDYSDVFLKAKKLYDAI
LLSGFLTVTDNETEAPLSSAMIKRYNEHKEDLALLKEYIRNISLKTYNEV
FKDDTKNGYAGYIDGKTNQEDFYVYLKNLLAEFEGADYFLEKIDREDFLR
KQRTFDNGSIPYQIHLQEMRAILDKQAKFYPFLAKNKERIEKILTFRIPY
YVGPLARGNSDFAWSIRKRNEKITPWNFEDVIDKESSAEAFINRMTSFDL
YLPEEKVLPKHSLLYETFNVYNELTKVRFIAESMRDYQFLDSKQKKDIVR
LYFKDKRKVTDKDIIEYLHAIYGYDGIELKGIEKQFNSSLSTYHDLLNII
NDKEFLDDSSNEAIIEEIIHTLTIFEDREMIKQRLSKFENIFDKSVLKKL
SRRHYTGWGKLSAKLINGIRDEKSGNTILDYLIDDGISNRNFMQLIHDDA
LSFKKKIQKAQIIGDEDKGNIKEVVKSLPGSPAIKKGILQSIKIVDELVK
VMGGRKPESIVVEMARENQYTNQGKSNSQQRLKRLEKSLKELGSKILKEN
IPAKLSKIDNNALQNDRLYLYYLQNGKDMYTGDDLDIDRLSNYDIDHIIP
QAFLKDNSIDNKVLVSSASNRGKSDDFPSLEVVKKRKTFWYQLLKSKLIS
QRKFDNLTKAERGGLLPEDKAGFIQRQLVETRQITKHVARLLDEKFNNKK
DENNRAVRTVKIITLKSTLVSQFRKDFELYKVREINDFHHAHDAYLNAVI
ASALLKKYPKLEPEFVYGDYPKYNSFRERKSATEKVYFYSNIMNIFKKSI
SLADGRVIERPLIEVNEETGESVWNKESDLATVRRVLSYPQVNVVKKVEE
QNHGLDRGKPKGLFNANLSSKPKPNSNENLVGAKEYLDPKKYGGYAGISN
SFAVLVKGTIEKGAKKKITNVLEFQGISILDRINYRKDKLNFLLEKGYKD
IELIIELPKYSLFELSDGSRRMLASILSTNNKRGEIHKGNQIFLSQKFVK
LLYHAKRISNTINENHRKYVENHKKEFEELFYYILEFNENYVGAKKNGKL
LNSAFQSWQNHSIDELCSSFIGPTGSERKGLFELTSRGSAADFEFLGVKI
PRYRDYTPSSLLKDATLIHQSVTGLYETRIDLAKLGEG

Streptococcus thermophilus CRISPR3Cas9 (St3Cas9) Nickase (D10A)

(SEQ ID NO: 323)
MTKPYSIGLAIGTNSVGWAVITDNYKVPSKKMKVLGNTSKKYIKKNLLGV
LLFDSGITAEGRRLKRTARRRYTRRRNRILYLQEIFSTEMATLDDAFFQR
LDDSFLVPDDKRDSKYPIFGNLVEEKVYHDEFPTIYHLRKYLADSTKKAD
LRLVYLALAHMIKYRGHFLIEGEFNSKNNDIQKNFQDFLDTYNAIFESDL
SLENSKQLEEIVKDKISKLEKKDRILKLFPGEKNSGIFSEFLKLIVGNQA
DFRKCFNLDEKASLHFSKESYDEDLETLLGYIGDDYSDVFLKAKKLYDAI
LLSGFLTVTDNETEAPLSSAMIKRYNEHKEDLALLKEYIRNISLKTYNEV
FKDDTKNGYAGYIDGKTNQEDFYVYLKNLLAEFEGADYFLEKIDREDFLR
KQRTFDNGSIPYQIHLQEMRAILDKQAKFYPFLAKNKERIEKILTFRIPY
YVGPLARGNSDFAWSIRKRNEKITPWNFEDVIDKESSAEAFINRMTSFDL
YLPEEKVLPKHSLLYETFNVYNELTKVRFIAESMRDYQFLDSKQKKDIVR
LYFKDKRKVTDKDIIEYLHAIYGYDGIELKGIEKQFNSSLSTYHDLLNII
NDKEFLDDSSNEAIIEEIIHTLTIFEDREMIKQRLSKFENIFDKSVLKKL
SRRHYTGWGKLSAKLINGIRDEKSGNTILDYLIDDGISNRNFMQLIHDDA
LSFKKKIQKAQIIGDEDKGNIKEVVKSLPGSPAIKKGILQSIKIVDELVK
VMGGRKPESIVVEMARENQYTNQGKSNSQQRLKRLEKSLKELGSKILKEN
IPAKLSKIDNNALQNDRLYLYYLONGKDMYTGDDLDIDRLSNYDIDHIIP
QAFLKDNSIDNKVLVSSASNRGKSDDFPSLEVVKKRKTFWYQLLKSKLIS
QRKFDNLTKAERGGLLPEDKAGFIQROLVETROITKHVARLLDEKFNNKK
DENNRAVRTVKIITLKSTLVSQFRKDFELYKVREINDFHHAHDAYLNAVI
ASALLKKYPKLEPEFVYGDYPKYNSFRERKSATEKVYFYSNIMNIFKKSI
SLADGRVIERPLIEVNEETGESVWNKESDLATVRRVLSYPQVNVVKKVEE
QNHGLDRGKPKGLFNANLSSKPKPNSNENLVGAKEYLDPKKYGGYAGISN
SFAVLVKGTIEKGAKKKITNVLEFQGISILDRINYRKDKLNFLLEKGYKD
IELIIELPKYSLFELSDGSRRMLASILSTNNKRGEIHKGNQIFLSQKFVK
LLYHAKRISNTINENHRKYVENHKKEFEELFYYILEFNENYVGAKKNGKL
LNSAFQSWQNHSIDELCSSFIGPTGSERKGLFELTSRGSAADFEFLGVKI
PRYRDYTPSSLLKDATLIHQSVTGLYETRIDLAKLGEG

[0085] It is appreciated that when the term “dCas9” or “nuclease-inactive Cas9” is used herein, it refers to Cas9 variants that are inactive in both HNH and RuvC domains as well as Cas9 nickases. For example, the dCas9 used in the present disclosure may include the amino acid sequence set forth in SEQ ID NO: 2 or SEQ ID NO: 3. In some embodiments, the dCas9 may comprise other mutations that inactivate RuvC or HNH domain. Additional suitable mutations that inactivate Cas9 will be apparent to those of skill in the art based on this disclosure and knowledge in the field, and are within the scope of this disclosure. Such additional exemplary suitable nuclease-inactive Cas9 domains include, but are not limited to, D839A and/or N863A (See, e.g., Prashant et al., Nature Biotechnology. 2013; 31(9): 833-838, the entire contents of which are incorporated herein by reference), or K603R (See. e.g., Chavez et al., Nature Methods 12, 326-328, 2015, the entire contents of which is incorporated herein by reference). The term Cas9, dCas9, or Cas9 variant also encompasses Cas9, dCas9, or Cas9 variants from any organism. Also appreciated is that dCas9, Cas9 nickase, or other appropriate Cas9 variants from any organisms may be used in accordance with the present disclosure. In one example, the Cas9 variants used herein are the D10A variants of Cas9 from S. pyogenes or S. aureus.

[0086] A “deaminase” refers to an enzyme that catalyzes the removal of an amine group from a molecule, or deamination. In some embodiments, the deaminase is a cytidine deaminase, catalyzing the deamination of cytidine or deoxycytidine to uridine or deoxyuridine, respectively. In some embodiments, the deaminase is a cytosine deaminase, catalyzing the hydrolytic deamination of cytosine to uracil (e.g., in RNA) or thymine (e.g., in DNA). In some embodiments, the deaminase is a naturally-occurring deaminase from an organism, such as a human, chimpanzee, gorilla, monkey, cow, dog, rat, or mouse. In some embodiments, the deaminase is a variant of a naturally-occurring deaminase from an organism, and the variant does not occur in nature. For example, in some embodiments, the deaminase or deaminase domain is at least 50%, at least 55%, at least 60%, at least 65%, at least 70%, at least 75% at least 80%, at least 85%, at least 90%, at least 95%, at least 96%, at least 97%, at least 98%, at least 99%, or at least 99.5% identical to a naturally-occurring deaminase from an organism.

[0087] A “cytosine deaminase” refers to an enzyme that catalyzes the chemical reaction “cytosine+H₂O [symbol] uracil+NH₃.” As it may be apparent from the reaction formula, such chemical reactions result in a C to U/T nucleobase change. In the context of a gene, such nucleotide change, or mutation, may in turn lead to an amino acid change in the protein, which may affect the protein's function, e.g., loss-of-function or gain-of-function.

[0088] One exemplary suitable class of cytosine deaminases is the apolipoprotein B mRNA-editing complex (APOBEC) family of cytosine deaminases encompassing eleven proteins that serve to initiate mutagenesis in a controlled and beneficial manner. The apolipoprotein B editing complex 3 (APOBEC3) enzyme provides protection to human cells against a certain HIV-1 strain via the deamination of cytosines in reverse-transcribed viral ssDNA. These cytosine deaminases all require a Zn²⁺-coordinating motif (His-X-Glu-X₂₃₋₂₆-Pro-Cys-X₂₋₄-Cys; SEQ ID NO: 324) and bound water molecule for catalytic activity. The glutamic acid residue acts to activate the water molecule to a zinc hydroxide for nucleophilic attack in the deamination reaction. Each family member preferentially deaminates at its own particular “hotspot,” for example, WRC (W is A or T. R is A or G) for hAID, TTC for hAPOBEC3F. A recent crystal structure of the catalytic domain of APOBEC3G revealed a secondary structure comprising a five-stranded β-sheet core flanked by six α-helices, which is believed to be conserved across the entire family. The active center loops have been shown to be responsible for both ssDNA binding and in determining “hotspot” identity. Overexpression of these enzymes has been linked to genomic instability and cancer, thus highlighting the importance of sequence-specific targeting. Another suitable cytosine deaminase is the activation-induced cytidine deaminase (AID), which is responsible for the maturation of antibodies by converting cytosines in ssDNA to uracils in a transcription-dependent, strand-biased fashion.

[0089] The term “base editors” or “nucleobase editors.” as used herein, broadly refer to any of the fusion proteins described herein. In some embodiments, the nucleobase editors are capable of precisely deaminating a target base to convert it to a different base, e.g., the base editor may target C bases in a nucleic acid sequence and convert the C to a T. In some embodiments, the base editor comprises a Cas9 (e.g., dCas9 and nCas9), CasX, CasY, Cpf1, C2c1, C2c2, C2c3, or Argonaute protein fused to a cytidine deaminase. For example, in certain embodiments, the base editor may be a cytosine deaminase-dCas9 fusion protein. In some embodiments, the base editor may be a deaminase-dCas9-UGI fusion protein. In some embodiments, the base editor may be a APOBEC1-dCas9-UGI fusion protein. In some embodiments, the base editor may be APOBEC1-Cas9 nickase-UGI fusion protein. In some embodiments, the base editor may be APOBEC1-dCpf1-UGI fusion protein. In some embodiments, the base editor may be APOBEC1-dNgAgo-UGI fusion protein. In some embodiments, the base editor may be APOBEC1-SpCas9 nickase-UGI fusion protein. In some embodiments, the base editor may be APOBEC1-SaCas9 nickase-UGI fusion protein. In some embodiments, the base editor comprises a CasX protein fused to a cytidine deaminase. In some embodiments, the base editor comprises a CasY protein fused to a cytidine deaminase. In some embodiments, the base editor comprises a Cpf1 protein fused to a cytidine deaminase. In some embodiments, the base editor comprises a C2c1 protein fused to a cytidine deaminase. In some embodiments, the base editor comprises a C2c2 protein fused to a cytidine deaminase. In some embodiments, the base editor comprises a C2c3 protein fused to a cytidine deaminase. In some embodiments, the base editor comprises an Argonaute protein fused to a cytidine deaminase. In some embodiments, the fusion protein described herein comprises a Gam protein, a guide nucleotide sequence-programmable DNA binding protein, and a cytidine deaminase domain. In some embodiments, the base editor comprises a Gam protein, fused to a CasX protein, which is fused to a cytidine deaminase. In some embodiments, the base editor comprises a Gam protein, fused to a CasY protein, which is fused to a cytidine deaminase. In some embodiments, the base editor comprises a Gam protein, fused to a Cpf1 protein, which is fused to a cytidine deaminase. In some embodiments, the base editor comprises a Gam protein, fused to a C2c1 protein, which is fused to a cytidine deaminase. In some embodiments, the base editor comprises a Gam protein, fused to a C2c2 protein, which is fused to a cytidine deaminase. In some embodiments, the base editor comprises a Gam protein, fused to a C2c3 protein, which is fused to a cytidine deaminase. In some embodiments, the base editor comprises a Gam protein, fused to an Argonaute protein, which is fused to a cytidine deaminase. Non-limiting exemplary sequences of the nucleobase editors useful in the present disclosure are provided in Example 1. SEQ ID NOs: 1-260, 270-292, or 315-323. Such nucleobase editors and methods of using them for genome editing have been described in the art, e.g., in U.S. Pat. No. 9,068,179, US Patent Application Publications US20150166980, US20150166981, US20150166982, US20150166984, and US20150165054, and U.S. Provisional Applications 62/245,828, 62/279,346, 62/311,763, 62/322,178, 62/357,352, 62/370,700, and 62/398,490 and in Komor et al., Nature, “Programmable editing of a target base in genomic DNA without double-stranded DNA cleavage.” 533, 420-424 (2016), each of which is incorporated herein by reference.

[0090] The term “uracil glycosylase inhibitor” or “UGI,” as used herein, refers to a protein that is capable of inhibiting a uracil-DNA glycosylase base-excision repair enzyme.

[0091] The term “Cas9 nickase.” as used herein, refers to a Cas9 protein that is capable of cleaving only one strand of a duplexed nucleic acid molecule (e.g., a duplexed DNA molecule). In some embodiments, a Cas9 nickase comprises a D10A mutation and has a histidine at position H840 of a wild type sequence, or a corresponding mutation in any of the Cas9 proteins provided herein. For example, a Cas9 nickase may comprise the amino acid sequence as set forth in SEQ ID NO: 683. Such a Cas9 nickase has an active HNH nuclease domain and is able to cleave the non-targeted strand of DNA, i.e., the strand bound by the gRNA. Further, such a Cas9 nickase has an inactive RuvC nuclease domain and is not able to cleave the targeted strand of the DNA, i.e., the strand where base editing is desired.

Exemplary Cas9 Nickase (Cloning Vector pPlatTET-gRNA2; Accession No. BAV54124).

(SEQ ID NO: 683)
MDKKYSIGLAIGTNSVGWAVITDEYKVPSKKFKVLGNTDRHSIKKNLIGA
LLFDSGETAEATRLKRTARRRYTRRKNRICYLQEIFSNEMAKVDDSFFHR
LEESFLVEEDKKHERHPIFGNIVDEVAYHEKYPTIYHLRKKLVDSTDKAD
LRLIYLALAHMIKFRGHFLIEGDLNPDNSDVDKLFIQLVQTYNQLFEENP
INASGVDAKAILSARLSKSRRLENLIAQLPGEKKNGLFGNLIALSLGLTP
NFKSNFDLAEDAKLQLSKDTYDDDLDNLLAQIGDQYADLFLAAKNLSDAI
LLSDILRVNTEITKAPLSASMIKRYDEHHQDLTLLKALVRQQLPEKYKEI
FFDQSKNGYAGYIDGGASQEEFYKFIKPILEKMDGTEELLVKLNREDLLR
KQRTFDNGSIPHQIHLGELHAILRRQEDFYPFLKDNREKIEKILTFRIPY
YVGPLARGNSRFAWMTRKSEETITPWNFEEVVDKGASAQSFIERMTNFDK
NLPNEKVLPKHSLLYEYFTVYNELTKVKYVTEGMRKPAFLSGEQKKAIVD
LLFKTNRKVTVKQLKEDYFKKIECFDSVEISGVEDRFNASLGTYHDLLKI
IKDKDFLDNEENEDILEDIVLTLTLFEDREMIEERLKTYAHLFDDKVMKQ
LKRRRYTGWGRLSRKLINGIRDKQSGKTILDFLKSDGFANRNFMQLIHDD
SLTFKEDIQKAQVSGQGDSLHEHIANLAGSPAIKKGILQTVKVVDELVKV
MGRHKPENIVIEMARENQTTQKGQKNSRERMKRIEEGIKELGSQILKEHP
VENTQLQNEKLYLYYLQNGRDMYVDQELDINRLSDYDVDHIVPQSFLKDD
SIDNKVLTRSDKNRGKSDNVPSEEVVKKMKNYWRQLLNAKLITQRKFDNL
TKAERGGLSELDKAGFIKRQLVETRQITKHVAQILDSRMNTKYDENDKLI
REVKVITLKSKLVSDFRKDFQFYKVREINNYHHAHDAYLNAVVGTALIKK
YPKLESEFVYGDYKVYDVRKMIAKSEQEIGKATAKYFFYSNIMNFFKTEI
TLANGEIRKRPLIETNGETGEIVWDKGRDFATVRKVLSMPQVNIVKKTEV
QTGGFSKESILPKRNSDKLIARKKDWDPKKYGGFDSPTVAYSVLVVAKVE
KGKSKKLKSVKELLGITIMERSSFEKNPIDFLEAKGYKEVKKDLIIKLPK
YSLFELENGRKRMLASAGELQKGNELALPSKYVNFLYLASHYEKLKGSPE
DNEQKQLFVEQHKHYLDEIIEQISEFSKRVILADANLDKVLSAYNKHRDK
PIREQAENIIHLFTLTNLGAPAAFKYFDTTIDRKRYTSTKEVLDATLIHQ
SITGLYETRIDLSQLGGD

[0092] The term “target site” or “target sequence” refers to a sequence within a nucleic acid molecule (e.g., a DNA molecule) that is deaminated by the fusion protein (e.g., a dCas9-deaminase fusion protein or a Gam-nCas9-deaminase fusion protein) provided herein. In some embodiments, the target sequence is a polynucleotide (e.g., a DNA), wherein the polynucleotide comprises a coding strand and a complementary strand. The meaning of a “coding strand” and “complementary strand,” as used herein, is the same as the common meaning of the terms in the art. In some embodiments, the target sequence is a sequence in the genome of a mammal. In some embodiments, the target sequence is a sequence in the genome of a human. In some embodiments, the target sequence is a sequence in the genome of a non-human animal. The term “target codon” refers to the amino acid codon that is edited by the base editor and converted to a different codon via deamination. The term “target base” refers to the nucleotide base that is edited by the base editor and converted to a different base via deamination. In some embodiments, the target codon in the coding strand is edited (e.g., deaminated). In some embodiments, the target codon in the complementary strand is edited (e.g., deaminated).

[0093] The term “linker.” as used herein, refers to a chemical group or a molecule linking two molecules or moieties, e.g., two domains of a fusion protein, such as, for example, a nuclease-inactive Cas9 domain and a nucleic acid editing domain (e.g., a deaminase domain). In some embodiments, a linker joins a gRNA binding domain of an RNA-programmable nuclease, including a Cas9 nuclease domain, and a catalytic domain of a nucleic-acid editing domain (e.g., a deaminase domain). In some embodiments, a linker joins a Cas9 domain (e.g., a Cas9 nickase) and a Gam protein. In some embodiments, a linker joins a gRNA binding domain of an RNA-programmable nuclease (e.g., dCas9) and a UGI domain. In some embodiments, a linker joins a a catalytic domain of a nucleic-acid editing domain (e.g., a deaminase domain) and a UGI domain. In some embodiments, a linker joins a catalytic domain of a nucleic-acid editing domain (e.g., a deaminase domain) and a Gam protein. In some embodiments, a linker joins a UGI domain and a Gam protein. Typically, the linker is positioned between, or flanked by, two groups, molecules, domains, or other moieties and connected to each one via a covalent bond, thus connecting the two. In some embodiments, the linker is an amino acid or a plurality of amino acids (e.g., a peptide or protein). In some embodiments, the linker is an organic molecule, group, polymer (e.g. a non-natural polymer, non-peptidic polymer), or chemical moiety. In some embodiments, the linker is 5-100 amino acids in length, for example, 5, 6, 7, 8, 9, 10, 11, 12, 13, 14, 15, 16, 17, 18, 19, 20, 21, 22, 23, 24, 25, 26, 27, 28, 29, 30, 30-35, 35-40, 40-45, 45-50, 50-60, 60-70, 70-80, 80-90, 90-100, 100-150, or 150-200 amino acids in length. Longer or shorter linkers are also contemplated. Linkers may be of any form known in the art. For example, the linker may be a linker from a website such as www[dot]ibi[dot]vu[dot]nl/programs/linkerdbwww/ or from www[dot] ibi[dot]vu[dot]nl/programs/linkerdbwww/src/database.txt. The linkers may also be unstructured, structured, helical, or extended.

[0094] The term “mutation,” as used herein, refers to a substitution of a residue within a sequence, e.g., a nucleic acid or amino acid sequence, with another residue, or a deletion or insertion of one or more residues within a sequence. Mutations are typically described herein by identifying the original residue followed by the position of the residue within the sequence and by the identity of the newly substituted residue. Various methods for making the amino acid substitutions (mutations) provided herein are well known in the art, and are provided by, for example, Green and Sambrook, Molecular Cloning: A Laboratory Manual (4^{th} ed., Cold Spring Harbor Laboratory Press. Cold Spring Harbor, N.Y. (2012)).

[0095] The terms “nucleic acid.” “polynucleotide,” and “nucleic acid molecule,” as used herein, refer to a compound comprising a nucleobase and an acidic moiety, e.g., a nucleoside, a nucleotide, or a polymer of nucleotides. Typically, polymeric nucleic acids, e.g., nucleic acid molecules comprising three or more nucleotides are linear molecules, in which adjacent nucleotides are linked to each other via a phosphodiester linkage. In some embodiments, “nucleic acid” refers to individual nucleic acid residues (e.g. nucleotides and/or nucleosides). In some embodiments. “nucleic acid” refers to an oligonucleotide chain comprising three or more individual nucleotide residues. As used herein, the terms “oligonucleotide” and “polynucleotide” can be used interchangeably to refer to a polymer of nucleotides (e.g., a string of at least three nucleotides). In some embodiments. “nucleic acid” encompasses RNA as well as single and/or double-stranded DNA. Nucleic acids may be naturally occurring, for example, in the context of a genome, a transcript, an mRNA, tRNA, rRNA, siRNA, snRNA, a plasmid, cosmid, chromosome, chromatid, or other naturally occurring nucleic acid molecule. On the other hand, a nucleic acid molecule may be a non-naturally occurring molecule, e.g., a recombinant DNA or RNA, an artificial chromosome, an engineered genome, or fragment thereof, or a synthetic DNA, RNA, DNA/RNA hybrid, or including non-naturally occurring nucleotides or nucleosides. Furthermore, the terms “nucleic acid,” “DNA,” “RNA,” and/or similar terms include nucleic acid analogs, e.g., analogs having other than a phosphodiester backbone. Nucleic acids can be purified from natural sources, produced using recombinant expression systems and optionally purified, chemically synthesized, etc. Where appropriate, e.g., in the case of chemically synthesized molecules, nucleic acids can comprise nucleoside analogs such as analogs having chemically modified bases or sugars, and backbone modifications. A nucleic acid sequence is presented in the 5′ to 3′ direction unless otherwise indicated. In some embodiments, a nucleic acid is or comprises natural nucleosides (e.g. adenosine, thymidine, guanosine, cytidine, uridine, deoxyadenosine, deoxythymidine, deoxyguanosine, and deoxycytidine); nucleoside analogs (e.g., 2-aminoadenosine. 2-thiothymidine, inosine, pyrrolo-pyrimidine, 3-methyl adenosine, 5-methylcytidine, 2-aminoadenosine, C5-bromouridine, C5-fluorouridine, C5-iodouridine, C5-propynyl-uridine, C5-propynyl-cytidine, C5-methylcytidine, 2-aminoadenosine, 7-deazaadenosine, 7-deazaguanosine, 8-oxoadenosine, 8-oxoguanosine, O(6)-methylguanine, and 2-thiocytidine); chemically modified bases; biologically modified bases (e.g., methylated bases); intercalated bases; modified sugars (e.g., 2′-fluororibose, ribose, 2′-deoxyribose, arabinose, and hexose); and/or modified phosphate groups (e.g., phosphorothioates and 5′-N-phosphoramidite linkages).

[0096] The terms “protein.” “peptide,” and “polypeptide” are used interchangeably herein, and refer to a polymer of amino acid residues linked together by peptide (amide) bonds. The terms refer to a protein, peptide, or polypeptide of any size, structure, or function. Typically, a protein, peptide, or polypeptide will be at least three amino acids long. A protein, peptide, or polypeptide may refer to an individual protein or a collection of proteins. One or more of the amino acids in a protein, peptide, or polypeptide may be modified, for example, by the addition of a chemical entity such as a carbohydrate group, a hydroxyl group, a phosphate group, a farnesyl group, an isofarnesyl group, a fatty acid group, a linker for conjugation, functionalization, or other modification, etc. A protein, peptide, or polypeptide may also be a single molecule or may be a multi-molecular complex. A protein, peptide, or polypeptide may be just a fragment of a naturally occurring protein or peptide. A protein, peptide, or polypeptide may be naturally occurring, recombinant, or synthetic, or any combination thereof. The term “fusion protein” as used herein refers to a hybrid polypeptide which comprises protein domains from at least two different proteins. One protein may be located at the amino-terminal (N-terminal) portion of the fusion protein or at the carboxy-terminal (C-terminal) protein thus forming an “amino-terminal fusion protein” or a “carboxy-terminal fusion protein,” respectively. A protein may comprise different domains, for example, a nucleic acid binding domain (e.g., the gRNA binding domain of Cas9 that directs the binding of the protein to a target site) and a nucleic acid cleavage domain or a catalytic domain of a nucleic-acid editing protein. In some embodiments, a protein is in a complex with, or is in association with, a nucleic acid, e.g., RNA. Any of the proteins provided herein may be produced by any method known in the art. For example, the proteins provided herein may be produced via recombinant protein expression and purification, which is especially well suited for fusion proteins comprising a peptide linker. Methods for recombinant protein expression and purification are well known, and include those described by Green and Sambrook, Molecular Cloning: A Laboratory Manual (4^{th} ed., Cold Spring Harbor Laboratory Press, Cold Spring Harbor, N.Y. (2012)), which is incorporated herein by reference.

[0097] The term “subject,” as used herein, refers to an individual organism, for example, an individual mammal. In certain embodiments of the aspects described herein, the subject is a mammal. e.g., a primate, e.g., a human. In some embodiments, the subject is a non-human mammal. In some embodiments, the subject is a non-human primate. Non-human primates include, but are not limited to, chimpanzees, cynomolgous monkeys, spider monkeys, and macaques, e.g., Rhesus. In some embodiments, the subject is any rodent, e.g., mice, rats, woodchucks, ferrets, rabbits and hamsters. In other embodiments, the subject is a domestic or game animal which includes, but is not limited to: cows, horses, pigs, deer, bison, buffalo, feline species, e.g., domestic cat, canine species, e.g., dog, fox, wolf, avian species, e.g., chicken, emu, ostrich, and fish, e.g., trout, catfish and salmon. In some embodiments, the subject is a sheep, a goat, a cattle, a cat, or a dog. In some embodiments, the subject is a research animal. In some embodiments, the subject is genetically engineered, e.g., a genetically engineered non-human subject. The subject may be of either sex and at any stage of development. For example, a subject may be male or female, and can be a fully developed subject (e.g., an adult) or a subject undergoing the developmental process (e.g., a child, infant or fetus). The term “patient” or “subject” includes any subset of the foregoing, e.g., all of the above, but excluding one or more groups or species such as humans, primates or rodents. The terms, “patient” and “subject” are used interchangeably herein.

[0098] The term “recombinant” as used herein in the context of proteins or nucleic acids refers to proteins or nucleic acids that do not occur in nature, but are the product of human engineering. For example, in some embodiments, a recombinant protein or nucleic acid molecule comprises an amino acid or nucleotide sequence that comprises at least one, at least two, at least three, at least four, at least five, at least six, or at least seven mutations as compared to any naturally occurring sequence. The fusion proteins (e.g., base editors) described herein are made recombinantly. Recombinant technology is familiar to those skilled in the art.

[0099] An “intron” refers to any nucleotide sequence within a gene that is removed by RNA splicing during maturation of the final RNA product. The term intron refers to both the DNA sequence within a gene and the corresponding sequence in RNA transcripts. Sequences that are joined together in the final mature RNA after RNA splicing are exons. Introns are found in the genes of most organisms and many viruses, and can be located in a wide range of genes, including those that generate proteins, ribosomal RNA (rRNA), and transfer RNA (tRNA). When proteins are generated from intron-containing genes, RNA splicing takes place as part of the RNA processing pathway that follows transcription and precedes translation.

[0100] An “exon” refers to any part of a gene that will become a part of the final mature RNA produced by that gene after introns have been removed by RNA splicing. The term exon refers to both the DNA sequence within a gene and to the corresponding sequence in RNA transcripts. In RNA splicing, introns are removed and exons are covalently joined to one another as part of generating the mature messenger RNA.

[0101] “Splicing” refers to the processing of a newly synthesized messenger RNA transcript (also referred to as a primary mRNA transcript). After splicing, introns are removed and exons are joined together (ligated) for form mature mRNA molecule containing a complete open reading frame that is decoded and translated into a protein. For nuclear-encoded genes, splicing takes place within the nucleus either co-transcriptionally or immediately after transcription. The molecular mechanism of RNA splicing has been extensively described, e.g., in Pagani et al., Nature Reviews Genetics 5, 389-396, 2004: Clancy et al., Nature Education 1 (1): 31, 2011; Cheng et al., Molecular Genetics and Genonmics 286 (5-6): 395-410, 2014; Taggart et al., Nature Structural & Molecular Biology 19 (7): 719-2, 2012, the contents of each of which are incorporated herein by reference. One skilled in the art is familiar with the mechanism of RNA splicing.

[0102] “Alternative splicing” refers to a regulated process during gene expression that results in a single gene coding for multiple proteins. In this process, particular exons of a gene may be included within or excluded from the final, processed messenger RNA (mRNA) produced from that gene. Consequently, the proteins translated from alternatively spliced mRNAs will contain differences in their amino acid sequence and, often, in their biological functions. Notably, alternative splicing allows the human genome to direct the synthesis of many more proteins than would be expected from its 20,000 protein-coding genes. Alternative splicing is sometimes also termed differential splicing. Alternative splicing occurs as a normal phenomenon in eukaryotes, where it greatly increases the biodiversity of proteins that can be encoded by the genome; in humans, ˜95% of multi-exonic genes are alternatively spliced. There are numerous modes of alternative splicing observed, of which the most common is exon skipping. In this mode, a particular exon may be included in mRNAs under some conditions or in particular tissues, and omitted from the mRNA in others. Abnormal variations in splicing are also implicated in disease; a large proportion of human genetic disorders result from splicing variants. Abnormal splicing variants are also thought to contribute to the development of cancer, and splicing factor genes are frequently mutated in different types of cancer. The regulation of alternative splicing is also described in the art. e.g., in Douglas et al., Annual Review of Biochemistry 72 (1): 291-336, 2003; Pan et al., Nature Genetics 40 (12): 1413-1415, 2008; Martin et al., Nature Reviews 6 (5): 386-398, 2005; Skotheim et al., The International Journal of Biochemistry & Cell Biology 39 (7-8): 1432-49, 2007, each of which is incorporated herein by reference.

[0103] A “coding frame” or “open reading frame” refers to a stretch of codons that encodes a polypeptide. Since DNA is interpreted in groups of three nucleotides (codons), a DNA strand has three distinct reading frames. The double helix of a DNA molecule has two anti-parallel strands so, with the two strands having three reading frames each, there are six possible frame translations. A functional protein may be produced when translation proceeds in the correct coding frame. An insertion or a deletion of one or two bases in the open reading frame causes a shift in the coding frame that is also referred to as a “frameshift mutation.” A frameshift mutation typical results in premature translation termination and/or truncated or non-functional protein.

[0104] These and other exemplary substituents are described in more detail in the Detailed Description, Examples, and Claims. The methods and compositions disclosed herein are not intended to be limited in any manner by the above exemplary listing of substituents.

### DETAILED DESCRIPTION OF CERTAIN EMBODIMENTS

[0105] Disclosed herein are novel genome/base-editing systems, methods, and compositions for generating engineered and naturally-occurring protective variants of the C-C Chemokine Receptor 5 (CCR5) protein to protect against human immunodeficiency virus (HIV) infection and acquired immune deficiency syndrome (AIDS). C-C Chemokine Receptor 5 (CCR5), also known as cluster of differentiation-195 (CD195), is a member of the beta chemokine receptor family. This protein is expressed by macrophages, dendritic cells, and memory T cells in the immune system; endothelial cells, epithelial cells, vascular smooth muscle cells, and fibroblasts; and microglia, neurons, and astrocytes in the central nervous system. See, e.g., Barmania and Pepper, Applied & Translational Genomics 2 (2013) 3-16, each of which is incorporated herein by reference. Macrophage-tropic (M-tropic) strains of HIV (e.g., M-tropic strains of HIV-1) can bind CCR5 in order to enter host cells.

[0106] Certain alleles of CCR5 have been associated with resistance to HIV infection. As one example, CCR5-Δ32 (also known as CCR5-D32, CCR5Δ32, or CCR5 delta 32) is a 32-base-pair deletion that introduces a premature stop codon into the CCR5 receptor locus, resulting in a non-functional receptor. CCR5-Δ32 has a heterozygote allele frequency of 10% and a homozygote frequency of 1% in Europe. Individuals who are homozygous for CCR5-Δ32 do not express functional CCR5 receptors on their cell surfaces and are resistant to HIV-1 infection (see, for example, Liu et al., (August 1996). “Homozygous defect in HIV-1 coreceptor accounts for resistance of some multiply-exposed individuals to HIV-1 infection”, Cell. 86 (3): 367-77). Individuals heterozygous for CCR5-Δ32 have a greater than 50% reduction in functional CCR5 receptors on their cell surfaces which interferes with transport of CCR5 to the cell surface. This level of reduction is due to the dimerization of mutant and wild-type receptors (see, for example. Benkirane et al., (December 1997). “Mechanism of transdominant inhibition of CCR5-mediated HIV-1 infection by ccr5delta32”. The Journal of Biological Chemistry. 272 (49): 30603-6). These heterozygous individuals are resistant to HIV-1 infection and, if infected, exhibit reduced viral loads and a two to three year delay in the development of AIDS (relative to individuals with two wild type CCR5 genes; see, for example, Dean M et al., (September 1996). “Genetic restriction of HIV-1 infection and progression to AIDS by a deletion allele of the CKR5 structural gene. Hemophilia Growth and Development Study, Multicenter AIDS Cohort Study, Multicenter Hemophilia Cohort Study, San Francisco City Cohort, ALIVE Study”. Science. 273 (5283): 1856-62; Liu et al., (August 1996). “Homozygous defect in HIV-1 coreceptor accounts for resistance of some multiply-exposed individuals to HIV-1 infection”. Cell. 86 (3): 367-77; Michael N L et al., (October 1997). “The role of CCR5 and CCR2 polymorphisms in HIV-1 transmission and disease progression”. Nature Medicine. 3 (10): 1160-2). Further, individuals who are homozygous for CCR5-Δ32 also display an improved response to anti-retroviral treatment (see, for example, Laurichesse et al., (May 2007). “Improved virological response to highly active antiretroviral therapy in HIV-1-infected patients carrying the CCR5 Delta32 deletion.” HIV Medicine, 8 (4): 213-9).

[0107] The mRNA sequence for human CCR5, which encodes a 352 amino acid protein, can be found under GenBank Accession No. NM_000579.3 (transcript variant A) or GenBank Accession No. NM_001100168.1 (transcript variant B). Mouse and rat CCR5 mRNA sequences have been deposited and can be found under GenBank Accession Nos.: NM_009917.5 and NM_053960.3, respectively. The wild-type CCR5 human, mouse, and rat protein sequences can be found under GenBank Accession Nos.: NP_001093638.1, NP_034047.2, and NP_446412.2, respectively.

Wild Type CCR5 Gene (>Gil154091329|Ref|NM_000579.3| Homo sapiens C-C Motif Chemokine Receptor 5 (Gene/Pseudogene) (CCR5), Transcript Variant a, mRNA. SEQ ID NO: 325)

CTTCAGATAGATTATATCTGGAGTGAAGAATCCTGCCACCTATGTATCTG
GCATAGTATTCTGTGTAGTGGGATGAGCAGAGAACAAAAACAAAATAATC
CAGTGAGAAAAGCCCGTAAATAAACCTTCAGACCAGAGATCTATTCTCTA
GCTTATTTTAAGCTCAACTTAAAAAGAAGAACTGTTCTCTGATTCTTTTC
GCCTTCAATACACTTAATGATTTAACTCCACCCTCCTTCAAAAGAAACAG
CATTTCCTACTTTTATACTGTCTATATGATTGATTTGCACAGCTCATCTG
GCCAGAAGAGCTGAGACATCCGTTCCCCTACAAGAAACTCTCCCCGGGTG
GAACAAGATGGATTATCAAGTGTCAAGTCCAATCTATGACATCAATTATT
ATACATCGGAGCCCTGCCAAAAAATCAATGTGAAGCAAATCGCAGCCCGC
CTCCTGCCTCCGCTCTACTCACTGGTGTTCATCTTTGGTTTTGTGGGCAA
CATGCTGGTCATCCTCATCCTGATAAACTGCAAAAGGCTGAAGAGCATGA
CTGACATCTACCTGCTCAACCTGGCCATCTCTGACCTGTTTTTCCTTCTT
ACTGTCCCCTTCTGGGCTCACTATGCTGCCGCCCAGTGGGACTTTGGAAA
TACAATGTGTCAACTCTTGACAGGGCTCTATTTTATAGGCTTCTTCTCTG
GAATCTTCTTCATCATCCTCCTGACAATCGATAGGTACCTGGCTGTCGTC
CATGCTGTGTTTGCTTTAAAAGCCAGGACGGTCACCTTTGGGGTGGTGAC
AAGTGTGATCACTTGGGTGGTGGCTGTGTTTGCGTCTCTCCCAGGAATCA
TCTTTACCAGATCTCAAAAAGAAGGTCTTCATTACACCTGCAGCTCTCAT
TTTCCATACAGTCAGTATCAATTCTGGAAGAATTTCCAGACATTAAAGAT
AGTCATCTTGGGGCTGGTCCTGCCGCTGCTTGTCATGGTCATCTGCTACT
CGGGAATCCTAAAAACTCTGCTTCGGTGTCGAAATGAGAAGAAGAGGCAC
AGGGCTGTGAGGCTTATCTTCACCATCATGATTGTTTATTTTCTCTTCTG
GGCTCCCTACAACATTGTCCTTCTCCTGAACACCTTCCAGGAATTCTTTG
GCCTGAATAATTGCAGTAGCTCTAACAGGTTGGACCAAGCTATGCAGGTG
ACAGAGACTCTTGGGATGACGCACTGCTGCATCAACCCCATCATCTATGC
CTTTGTCGGGGAGAAGTTCAGAAACTACCTCTTAGTCTTCTTCCAAAAGC
ACATTGCCAAACGCTTCTGCAAATGCTGTTCTATTTTCCAGCAAGAGGCT
CCCGAGCGAGCAAGCTCAGTTTACACCCGATCCACTGGGGAGCAGGAAAT
ATCTGTGGGCTTGTGACACGGACTCAAGTGGGCTGGTGACCCAGTCAGAG
TTGTGCACATGGCTTAGTTTTCATACACAGCCTGGGCTGGGGGTGGGGTG
GGAGAGGTCTTTTTTAAAAGGAAGTTACTGTTATAGAGGGTCTAAGATTC
ATCCATTTATTTGGCATCTGTTTAAAGTAGATTAGATCTTTTAAGCCCAT
CAATTATAGAAAGCCAAATCAAAATATGTTGATGAAAAATAGCAACCTTT
TTATCTCCCCTTCACATGCATCAAGTTATTGACAAACTCTCCCTTCACTC
CGAAAGTTCCTTATGTATATTTAAAAGAAAGCCTCAGAGAATTGCTGATT
CTTGAGTTTAGTGATCTGAACAGAAATACCAAAATTATTTCAGAAATGTA
CAACTTTTTACCTAGTACAAGGCAACATATAGGTTGTAAATGTGTTTAAA
ACAGGTCTTTGTCTTGCTATGGGGAGAAAAGACATGAATATGATTAGTAA
AGAAATGACACTTTTCATGTGTGATTTCCCCTCCAAGGTATGGTTAATAA
GTTTCACTGACTTAGAACCAGGCGAGAGACTTGTGGCCTGGGAGAGCTGG
GGAAGCTTCTTAAATGAGAAGGAATTTGAGTTGGATCATCTATTGCTGGC
AAAGACAGAAGCCTCACTGCAAGCACTGCATGGGCAAGCTTGGCTGTAGA
AGGAGACAGAGCTGGTTGGGAAGACATGGGGAGGAAGGACAAGGCTAGAT
CATGAAGAACCTTGACGGCATTGCTCCGTCTAAGTCATGAGCTGAGCAGG
GAGATCCTGGTTGGTGTTGCAGAAGGTTTACTCTGTGGCCAAAGGAGGGT
CAGGAAGGATGAGCATTTAGGGCAAGGAGACCACCAACAGCCCTCAGGTC
AGGGTGAGGATGGCCTCTGCTAAGCTCAAGGCGTGAGGATGGGAAGGAGG
GAGGTATTCGTAAGGATGGGAAGGAGGGAGGTATTCGTGCAGCATATGAG
GATGCAGAGTCAGCAGAACTGGGGTGGATTTGGGTTGGAAGTGAGGGTCA
GAGAGGAGTCAGAGAGAATCCCTAGTCTTCAAGCAGATTGGAGAAACCCT
TGAAAAGACATCAAGCACAGAAGGAGGAGGAGGAGGTTTAGGTCAAGAAG
AAGATGGATTGGTGTAAAAGGATGGGTCTGGTTTGCAGAGCTTGAACACA
GTCTCACCCAGACTCCAGGCTGTCTTTCACTGAATGCTTCTGACTTCATA
GATTTCCTTCCCATCCCAGCTGAAATACTGAGGGGTCTCCAGGAGGAGAC
TAGATTTATGAATACACGAGGTATGAGGTCTAGGAACATACTTCAGCTCA
CACATGAGATCTAGGTGAGGATTGATTACCTAGTAGTCATTTCATGGGTT
GTTGGGAGGATTCTATGAGGCAACCACAGGCAGCATTTAGCACATACTAC
ACATTCAATAAGCATCAAACTCTTAGTTACTCATTCAGGGATAGCACTGA
GCAAAGCATTGAGCAAAGGGGTCCCATAGAGGTGAGGGAAGCCTGAAAAA
CTAAGATGCTGCCTGCCCAGTGCACACAAGTGTAGGTATCATTTTCTGCA
TTTAACCGTCAATAGGCAAAGGGGGGAAGGGACATATTCATTTGGAAATA
AGCTGCCTTGAGCCTTAAAACCCACAAAAGTACAATTTACCAGCCTCCGT
ATTTCAGACTGAATGGGGGTGGGGGGGGCGCCTTAGGTACTTATTCCAGA
TGCCTTCTCCAGACAAACCAGAAGCAACAGAAAAAATCGTCTCTCCCTCC
CTTTGAAATGAATATACCCCTTAGTGTTTGGGTATATTCATTTCAAAGGG
AGAGAGAGAGGTTTTTTTCTGTTCTGTCTCATATGATTGTGCACATACTT
GAGACTGTTTTGAATTTGGGGGATGGCTAAAACCATCATAGTACAGGTAA
GGTGAGGGAATAGTAAGTGGTGAGAACTACTCAGGGAATGAAGGTGTCAG
AATAATAAGAGGTGCTACTGACTTTCTCAGCCTCTGAATATGAACGGTGA
GCATTGTGGCTGTCAGCAGGAAGCAACGAAGGGAAATGTCTTTCCTTTTG
CTCTTAAGTTGTGGAGAGTGCAACAGTAGCATAGGACCCTACCCTCTGGG
CCAAGTCAAAGACATTCTGACATCTTAGTATTTGCATATTCTTATGTATG
TGAAAGTTACAAATTGCTTGAAAGAAAATATGCATCTAATAAAAAACACC
TTCTAAAATAAAAAAAAAAAAAAAAAAAAAAAAAAA

Wild Type CCR5 Gene, Transcript Variant B (>Gil154091327|ref|NM_001100168.1| Homo sapiens C-C Motif Chemokine Receptor 5 (Gene/Pseudogene) (CCR5), Transcript Variant B, mRNA, SEQ ID NO: 326)

CTTCAGATAGATTATATCTGGAGTGAAGAATCCTGCCACCTATGTATCTG
GCATAGTCTCATCTGGCCAGAAGAGCTGAGACATCCGTTCCCCTACAAGA
AACTCTCCCCGGGTGGAACAAGATGGATTATCAAGTGTCAAGTCCAATCT
ATGACATCAATTATTATACATCGGAGCCCTGCCAAAAAATCAATGTGAAG
CAAATCGCAGCCCGCCTCCTGCCTCCGCTCTACTCACTGGTGTTCATCTT
TGGTTTTGTGGGCAACATGCTGGTCATCCTCATCCTGATAAACTGCAAAA
GGCTGAAGAGCATGACTGACATCTACCTGCTCAACCTGGCCATCTCTGAC
CTGTTTTTCCTTCTTACTGTCCCCTTCTGGGCTCACTATGCTGCCGCCCA
GTGGGACTTTGGAAATACAATGTGTCAACTCTTGACAGGGCTCTATTTTA
TAGGCTTCTTCTCTGGAATCTTCTTCATCATCCTCCTGACAATCGATAGG
TACCTGGCTGTCGTCCATGCTGTGTTTGCTTTAAAAGCCAGGACGGTCAC
CTTTGGGGTGGTGACAAGTGTGATCACTTGGGTGGTGGCTGTGTTTGCGT
CTCTCCCAGGAATCATCTTTACCAGATCTCAAAAAGAAGGTCTTCATTAC
ACCTGCAGCTCTCATTTTCCATACAGTCAGTATCAATTCTGGAAGAATTT
CCAGACATTAAAGATAGTCATCTTGGGGCTGGTCCTGCCGCTGCTTGTCA
TGGTCATCTGCTACTCGGGAATCCTAAAAACTCTGCTTCGGTGTCGAAAT
GAGAAGAAGAGGCACAGGGCTGTGAGGCTTATCTTCACCATCATGATTGT
TTATTTTCTCTTCTGGGCTCCCTACAACATTGTCCTTCTCCTGAACACCT
TCCAGGAATTCTTTGGCCTGAATAATTGCAGTAGCTCTAACAGGTTGGAC
CAAGCTATGCAGGTGACAGAGACTCTTGGGATGACGCACTGCTGCATCAA
CCCCATCATCTATGCCTTTGTCGGGGAGAAGTTCAGAAACTACCTCTTAG
TCTTCTTCCAAAAGCACATTGCCAAACGCTTCTGCAAATGCTGTTCTATT
TTCCAGCAAGAGGCTCCCGAGCGAGCAAGCTCAGTTTACACCCGATCCAC
TGGGGAGCAGGAAATATCTGTGGGCTTGTGACACGGACTCAAGTGGGCTG
GTGACCCAGTCAGAGTTGTGCACATGGCTTAGTTTTCATACACAGCCTGG
GCTGGGGGTGGGGTGGGAGAGGTCTTTTTTAAAAGGAAGTTACTGTTATA
GAGGGTCTAAGATTCATCCATTTATTTGGCATCTGTTTAAAGTAGATTAG
ATCTTTTAAGCCCATCAATTATAGAAAGCCAAATCAAAATATGTTGATGA
AAAATAGCAACCTTTTTATCTCCCCTTCACATGCATCAAGTTATTGACAA
ACTCTCCCTTCACTCCGAAAGTTCCTTATGTATATTTAAAAGAAAGCCTC
AGAGAATTGCTGATTCTTGAGTTTAGTGATCTGAACAGAAATACCAAAAT
TATTTCAGAAATGTACAACTTTTTACCTAGTACAAGGCAACATATAGGTT
GTAAATGTGTTTAAAACAGGTCTTTGTCTTGCTATGGGGAGAAAAGACAT
GAATATGATTAGTAAAGAAATGACACTTTTCATGTGTGATTTCCCCTCCA
AGGTATGGTTAATAAGTTTCACTGACTTAGAACCAGGCGAGAGACTTGTG
GCCTGGGAGAGCTGGGGAAGCTTCTTAAATGAGAAGGAATTTGAGTTGGA
TCATCTATTGCTGGCAAAGACAGAAGCCTCACTGCAAGCACTGCATGGGC
AAGCTTGGCTGTAGAAGGAGACAGAGCTGGTTGGGAAGACATGGGGAGGA
AGGACAAGGCTAGATCATGAAGAACCTTGACGGCATTGCTCCGTCTAAGT
CATGAGCTGAGCAGGGAGATCCTGGTTGGTGTTGCAGAAGGTTTACTCTG
TGGCCAAAGGAGGGTCAGGAAGGATGAGCATTTAGGGCAAGGAGACCACC
AACAGCCCTCAGGTCAGGGTGAGGATGGCCTCTGCTAAGCTCAAGGCGTG
AGGATGGGAAGGAGGGAGGTATTCGTAAGGATGGGAAGGAGGGAGGTATT
CGTGCAGCATATGAGGATGCAGAGTCAGCAGAACTGGGGTGGATTTGGGT
TGGAAGTGAGGGTCAGAGAGGAGTCAGAGAGAATCCCTAGTCTTCAAGCA
GATTGGAGAAACCCTTGAAAAGACATCAAGCACAGAAGGAGGAGGAGGAG
GTTTAGGTCAAGAAGAAGATGGATTGGTGTAAAAGGATGGGTCTGGTTTG
CAGAGCTTGAACACAGTCTCACCCAGACTCCAGGCTGTCTTTCACTGAAT
GCTTCTGACTTCATAGATTTCCTTCCCATCCCAGCTGAAATACTGAGGGG
TCTCCAGGAGGAGACTAGATTTATGAATACACGAGGTATGAGGTCTAGGA
ACATACTTCAGCTCACACATGAGATCTAGGTGAGGATTGATTACCTAGTA
GTCATTTCATGGGTTGTTGGGAGGATTCTATGAGGCAACCACAGGCAGCA
TTTAGCACATACTACACATTCAATAAGCATCAAACTCTTAGTTACTCATT
CAGGGATAGCACTGAGCAAAGCATTGAGCAAAGGGGTCCCATAGAGGTGA
GGGAAGCCTGAAAAACTAAGATGCTGCCTGCCCAGTGCACACAAGTGTAG
GTATCATTTTCTGCATTTAACCGTCAATAGGCAAAGGGGGGAAGGGACAT
ATTCATTTGGAAATAAGCTGCCTTGAGCCTTAAAACCCACAAAAGTACAA
TTTACCAGCCTCCGTATTTCAGACTGAATGGGGGTGGGGGGGGCGCCTTA
GGTACTTATTCCAGATGCCTTCTCCAGACAAACCAGAAGCAACAGAAAAA
ATCGTCTCTCCCTCCCTTTGAAATGAATATACCCCTTAGTGTTTGGGTAT
ATTCATTTCAAAGGGAGAGAGAGAGGTTTTTTTCTGTTCTGTCTCATATG
ATTGTGCACATACTTGAGACTGTTTTGAATTTGGGGGATGGCTAAAACCA
TCATAGTACAGGTAAGGTGAGGGAATAGTAAGTGGTGAGAACTACTCAGG
GAATGAAGGTGTCAGAATAATAAGAGGTGCTACTGACTTTCTCAGCCTCT
GAATATGAACGGTGAGCATTGTGGCTGTCAGCAGGAAGCAACGAAGGGAA
ATGTCTTTCCTTTTGCTCTTAAGTTGTGGAGAGTGCAACAGTAGCATAGG
ACCCTACCCTCTGGGCCAAGTCAAAGACATTCTGACATCTTAGTATTTGC
ATATTCTTATGTATGTGAAAGTTACAAATTGCTTGAAAGAAAATATGCAT
CTAATAAAAAACACCTTCTAAAATAAAAAAAAAAAAAAAAAAAAAAAAAA
A

Human CCR5 Amino Acid Sequence (>Gil154091328|Ref|NP_001093638.1| C-C Chemokine Receptor Type 5 [Homo sapiens], SEQ ID NO: 327)

MDYQVSSPIYDINYYTSEPCQKINVKQIAARLLPPLYSLVFIFGFVGNML
VILILINCKRLKSMTDIYLLNLAISDLFFLLTVPFWAHYAAAQWDFGNTM
CQLLTGLYFIGFFSGIFFIILLTIDRYLAVVHAVFALKARTVTFGVVTSV
ITWVVAVFASLPGIIFTRSQKEGLHYTCSSHFPYSQYQFWKNFQTLKIVI
LGLVLPLLVMVICYSGILKTLLRCRNEKKRHRAVRLIFTIMIVVFLFWAP
YNIVLLLNTFQEFFGLNNCSSSNRLDQAMQVTETLGMTHCCINPIIYAFV
GEKFRNYLLVFFQKHIAKRFCKCCSIFQQEAPERASSVYTRSTGEQEISV
GL

Mouse CCR5 Amino Acid Sequence (>Gi|31542356|Ref|NP_034047.2| C-C Chemokine Receptor Type 5 [Mus musculus], SEQ ID NO: 328)

MDFQGSVPTYSYDIDYGMSAPCQKINVKQIAAQLLPPLYSLVFIFGFVGN
MMVFLILISCKKLKSVTDIYLLNLAISDLLFLLTLPFWAHYAANEWVFGN
IMCKVFTGLYHIGYFGGIFFIILLTIDRYLAIVHAVFALKVRTVNFGVIT
SVVTWAVAVFASLPEIIFTRSQKEGFHYTCSPHFPHTQYHFWKSFQTLKM
VILSLILPLLVMVICYSGILHTLFRCRNEKKRHRAVRLIFAIMIVYFLFW
TPYNIVLLLTTFQEFFGLNNCSSSNRLDQAMQATETLGMTHCCLNPVIYA
FVGEKFRSYLSVFFRKHMVKRFCKRCSIFQQDNPDRASSVYTRSTGEHEV
STGL

Rat CCR5 Amino Acid Sequence (>Gi|51592090|Ref|NP_446412.2| C-C Chemokine Receptor Type 5 [Rattus norvegicus], SEQ ID NO: 329)

MDFQGSIPTYIYDIDYSMSAPCQKFNVKQIAAQLLPPLYSLVFIFGFVGN
MMVFLILISCKKLKSMTDIYLFNLAISDLLFLLTLPFWAHYAANEWVFGN
IMCKLFTGIYHIGYFGGIFFIILLTIDRYLAIVHAVFAIKARTVNFGVIT
SVVTWVVAVFVSLPEIIFMRSQKEGSHYTCSPHFPRIQYRFWKHFQTLKM
VILSLILPLLVMVICYSGILNTLFRCRNEKKRHRAVRLIFAIMIVYFLFW
TPYNIVLLLTTFQEYFGLNNCSSSNRLDQAMQVTETLGMTHCCLNPVIYA
FVGEKFRNYLSVFFRKHIVKRFCKHCSIFQQVNPDRVSSVYTRSTGEQEV
STGL

### Strategies for Generating CCR5 Mutants

[0108] Some aspects of the present disclosure provide systems, compositions, and methods of editing polynucleotides encoding the CCR5 protein to introduce mutations into the CCR5 gene. The gene editing methods described herein, rely on nucleobase editors as described in U.S. Pat. No. 9,068,179, US Patent Application Publications US20150166980, US20150166981, US20150166982, US20150166984, and US20150165054, and U.S. Provisional Applications 62/245,828, 62/279,346, 62/311,763, 62/322,178, 62/357,352, 62/370,700, and 62/398,490, and in Komor et al., Nature, Programmable editing of a target base in genomic DNA without double-stranded DNA cleavage, 533, 420-424 (2016), each of which are incorporated herein by reference.

[0109] The nucleobase editors are highly efficient at precisely editing a target base in the CCR5 gene, and a DNA double stand break is not necessary for the gene editing, thus reducing genome instability and preventing possible oncogenic modifications that may be caused by other genome editing methods. The nucleobase editors described herein may be programmed to target and modify a single base. In some embodiments, the target base is a cytosine (C) base and may be converted to a thymine (T) base via deamination by the nucleobase editor.

[0110] To edit the polynucleotide encoding the CCR5 protein, the polynucleotide is contacted with a nucleobase editors described herein. In some embodiments, the CCR5-encoding polynucleotide is contacted with a nucleobase editor and a guide nucleotide sequence, wherein the guide nucleotide sequence targets the nucleobase editor to the target base (e.g., a C base) in the CCR5-encoding polynucleotide.

[0111] In some embodiments, the CCR5-encoding polynucleotide is the CCR5 gene locus in the genomic DNA of a cell. In some embodiments, the cell is a cultured cell. In some embodiments, the cell is in vivo. In some embodiments, the cell is in vitro. In some embodiments, the cell is ex vivo. In some embodiments, the cell is from a mammal. In some embodiments, the mammal is a human. In some embodiments, the mammal is a rodent. In some embodiments, the rodent is a mouse. In some embodiments, the rodent is a rat.

[0112] As would be understood be those skilled in the art, the CCR5-encoding polynucleotide may be a DNA molecule comprising a coding strand and a complementary strand, e.g., the CCR5 gene locus in a genome. As such, the CCR5-encoding polynucleotide may also include coding regions (e.g., exons) and non-coding regions (e.g., introns or splicing sites). In some embodiments, the target base (e.g., a C base) is located in a coding region (e.g., an exon) of the CCR5-encoding polynucleotide (e.g., the CCR5 gene locus). As such, the conversion of a base in the coding region may result in an amino acid change in the CCR5 protein sequence, i.e., a mutation. In some embodiments, the mutation is a loss of function mutation. In some embodiments, the CCR5 loss-of-function mutation is identical (or similar) to a naturally occurring CCR5 loss-of-function mutation, e.g., D2V (D2N), C20S (C20Y), C101X (C101Y), G106R, C178R (C178Y), R223Q, C269F (C269Y). In some embodiments, the loss-of-function mutation is engineered (i.e., not naturally occurring), e.g., Q4X, P19S, P19L, Q2IX, P34S, P34L, P35S, P35L, G44R, G44D, G44S, G47R, G47D, G47S, W86X, Q93X, W94X, Q102X, G111R, G111D, G115R, G115D, G115E, G145R, G145E, S149N, G163R, G163E, S149N, P162S, P162L, G163R, G163D, G163E, P183S, P183L, Q186X, Q188X, W190X, G202R, G202E, P206S, P206L, G216S, G216D, W248X, Q261X, Q277X, Q280X, E283R, E283K, C290T, C290Y, C291Y, C291T, P293S, P293L, Q328X, Q329X, P332S, P332L, R334X, A335V, R341X. This engineered mutation may be an engineered truncation.

[0113] In some embodiments, the target base is located in a non-coding region of the CCR5 gene, e.g., in an intron or a splicing site. In some embodiments, a target base is located in a splicing site and the editing of such target base causes alternative splicing of the CCR5 mRNA. In some embodiments, the alternative splicing leads to loss-of-function CCR5 mutants. In some embodiments, the alternative splicing leads to the introduction of a premature stop codon in a CCR5 mRNA, resulting in truncated and unstable CCR5 proteins. In some embodiments, CCR5 mutants that are defective in terms of folding are produced.

[0114] CCR5 variants that are particularly useful in creating using the present disclosure are variants that may increase resistance to infection by human immunodeficiency virus (HIV), prevent infection by HIV, delay the onset of AIDS, and/or slow the progression of AIDS. In some embodiments, the CCR5 variants are loss-of-function variants produced using the methods of the present disclosure express efficiently in a cell. As described herein, a loss-of function CCR5 variant may have reduced activity or levels (e.g., the CCR5 variant may not be folded correctly, may not be transported to the membrane, may demonstrate reduced binding to a ligand including RANTES, MIP-1β, or MIP-1α, may demonstrate reduced transduction of signals through the G-proteins, or may have a reduced interaction with HIV) compared to a wild type CCR5 protein. For example, the activity or levels of a loss-of-function CCR5 variant may be reduced by at least 20%, at least 30%, at least 40%, at least 50%, at least 60%, at least 70%, at least 80%, at least 90%, at least 99%, or more. In some embodiments, the loss-of-function CCR5 variant has no more than 50%, no more than 40%, no more than 30%, no more than 20%, no more than 10%, no more than 5%, no more than 1%, or less activity (e.g., the CCR5 variant may not be folded correctly, may not be transported to the membrane, may demonstrate reduced binding to a ligand including RANTES, MIP-1β, or MIP-1α, may demonstrate reduced transduction of signals through the G-proteins, or may have a reduced interaction with HIV) compared to a wild type CCR5 protein. In other embodiments, the loss-of-function CCR5 variant inhibits the spread of HIV infection from cell to cell either in vitro or in vivo by more than 90%, more than 80%, more than 70%, more than 60%, more than 50%, more than 40%, more than 30%, more than 20%, or more than 10% compared to a wild type CCR5 protein. Non-limiting, exemplary assays for determining CCR5 activity may be demonstrated by any known methodology, such as the assay for chemokine binding as disclosed by Van Riper et al., J. Exp. Med., 177, 851-856 (1993), which may be readily adapted for measurement of CCR5 binding, which is incorporated herein by reference. Non-limiting, exemplary assays for determining inhibition of the spread of HIV infection between cells may be demonstrated by methods known in the art, such as the HIV quantitation assay disclosed by Nunberg, et al., J. Virology, 65 (9). 4887-4892 (1991).

[0115] To change the CCR5 gene, the nucleobase editor interacts with the CCR5 gene (a polynucleotide molecule), wherein the nucleobase editor binds to its target sequence and edits the desired nucleobase. For example, the nucleobase editor may be expressed in a cell where CCR5 gene editing is desired (e.g., macrophages, dendritic cells, and memory T cells of the immune system; endothelial cells, epithelial cells, vascular smooth muscle cells, and fibroblasts; and microglia, neurons, and astrocytes in the central nervous system), to thereby allowing interaction of the CCR5 gene with the nucleobase editor. In some embodiments, the binding of the nucleobase editor to its target sequence in the CCR5 is mediated by a guide nucleotide sequence, e.g., a polynucleotide comprising a nucleotide sequence that is complementary to one of the strands of the target sequence in the CCR5 gene. Thus, by designing the guide nucleotide sequence, the nucleobase editor may be programmed to edit any specific target base in the CCR5 gene. In some embodiments, the guide nucleotide sequence is co-expressed with the nucleobase editor in a cell where editing is desired.

### Codon Change

[0116] Using the nucleobase editors described herein, several amino acid codons may be converted to a different codon via deamination of a target base within the codon. For example, in some embodiments, a cytosine (C) base is converted to a thymine (T) base via deamination by a nucleobase editor comprising a cytosine deaminase domain (e.g., APOBEC1 or AID). As it is familiar to one skilled in the art, conversion of a base in an amino acid codon may lead to a change of the encoded amino acid in the protein product. Cytosine deaminases are capable of converting a cytosine (C) base to a deoxyuridine (dU) base via deamination, which is replicated as a thymine (T). Thus, it is envisioned that, for amino acid codons containing a C base, the C base may be converted to T in the CCR5 gene. For example, leucine codon (ETC) may be changed to a TTC (phenylalanine) codon via the deamination of the first C on the coding strand. For amino acid codons that contains a guanine (G) base, a C base is present on the complementary strand; and the G base may be convened to an adenosine (A) via the deamination of the C on the complementary strand. For example, a ATG (Met/M) codon may be converted to a ATA (Ile/I) codon via the deamination of the third C on the complementary strand. In some embodiments, two C to T changes are required to convert a codon to a different codon. Non-limiting examples of possible mutations that may be made in a CCR5-encoding polynucleotide by the nucleobase editors of the present disclosure in order to produce novel CCR5 variants are summarized in Table 7.

[0117] In some embodiments, to bind to its target sequence and edit the desired base, the nucleobase editor depends on its guide nucleotide sequence (e.g., a guide RNA). In some embodiments, the guide nucleotide sequence is a gRNA sequence. An gRNA typically comprises a tracrRNA framework allowing for Cas9 binding, and a guide sequence, which confers sequence specificity to fusion proteins disclosed herein. In some embodiments, the guide RNA comprises a structure 5′-[guide sequence]-guuuuagagcuagaaauagcaaguuaaaauaaaggcuaguccguuaucaacuugaaaaaguggcaccgagucggugcuuuuu-3′ (SEQ ID NO: 330), wherein the guide sequence comprises a sequence that is complementary to the target sequence. In some embodiments, the guide RNA comprises a structure 5′-[guide sequence]-guuuuaguacucuggaaacagaaucuacuaaaacaaggcaaaaugccguguuuaucucgucaacuuguuggcgagauuuuuu-3′ (SEQ ID NO: 331), wherein the guide sequence comprises a sequence that is complementary to the target sequence. The guide sequence is typically 20 nucleotides long. For example, the guide sequence may be 15-25 nucleotides long. In certain embodiments, the guide sequence may be 15-20 or 20-25 nucleotides long. In some embodiments, the guide sequence is 15, 16, 17, 18, 19, 20, 21, 22, 23, 24, or 25 nucleotides long. Such suitable guide RNA sequences typically comprise guide sequences that are complementary to a nucleic sequence within 50 nucleotides upstream or downstream of the target nucleotide to be edited. In certain embodiments, the tracerRNA sequence may be guuuuagagcuagaaauagcaaguuaaaauaaaggcuaguccguuaucaacuugaaaaaguggcaccgagucggugcuuuuu (SEQ ID NO: 330) or guuuuaguacucuggaaacagaaucuacuaaaacaaggcaaaaugccguguuuaucucgucaacuuguuggcgagauuuuuu (SEQ ID NO: 331) or may have greater than or equal to 80% homology (e.g., greater than or equal to 80%, greater than or equal to 81%, greater than or equal to 82%, greater than or equal to 83%, greater than or equal to 84%, greater than or equal to 85%, greater than or equal to 86%, greater than or equal to 87%, greater than or equal to 88%, greater than or equal to 89%, greater than or equal to 90%, greater than or equal to 91%, greater than or equal to 92%, greater than or equal to 93%, greater than or equal to 94%, greater than or equal to 95%, greater than or equal to 96%, greater than or equal to 97%, greater than or equal to 98%, or greater than or equal to 99% homology) with one of these sequences.

[0118] Guide sequences that may be used to target the nucleobase editor to its target sequence to induce specific mutations are provided in Tables 3-5 and 8-10. The mutations and guide sequences presented herein are for illustration purpose only and are not meant to be limiting.

[0119] In some embodiments, cellular CCR5 activity may be reduced by reducing the level of properly folded, active CCR5 protein displayed on the surface of cells. Introducing destabilizing mutations into the wild type CCR5 protein may cause misfolding or deactivation of the protein, lack of maturation or glycosylation, or enhanced recycling by the vesicular system. A CCR5 variant comprising one or more destabilizing mutations described herein may have reduced levels or activity compared to the wild type CCR5 protein (e.g., the CCR5 variant may not be folded correctly, may not be transported to the membrane, may demonstrate reduced binding to a ligand including RANTES, MIP-1β, or MIP-1α, may demonstrate reduced transduction of signals through the G-proteins, or may have a reduced interaction with HIV). For example, the levels or activity of a CCR5 variant comprising one or more destabilizing mutations described herein may be reduced by at least about 20%, at least about 30%, at least about 40%, at least about 50%, at least about 60%, at least about 70%, at least about 80%, at least about 90%, at least about 95%, at least about 99%, or more.

[0120] The present disclosure further provides mutations that cause misfolding of CCR5 protein or structural destabilization of the CCR5 protein. Non-limiting, exemplary destabilizing CCR5 mutations that may be made using the methods described herein are shown in Table 1.

[0121] In some embodiments, CCR5 variants comprising more than one mutation described herein are contemplated. For example, a CCR5 variant may be produced using the methods described herein that include 1, 2, 3, 4, 5, 6, 7, 8, 9, 10, or more mutations selected from Tables 1-10. To make multiple mutations in the CCR5 gene, a plurality of guide nucleotide sequences may be used, each guide nucleotide sequence targeting one specific base. The nucleobase editor is capable of editing the base dictated by the guide nucleotide sequence. For example, 1, 2, 3, 4, 5, 6, 7, 8, 9, 10, or more guide nucleotide sequences may be used in a gene editing process. In some embodiments, the guide nucleotide sequences are RNAs (e.g., gRNA). In some embodiments, the guide nucleotide sequences are single stranded DNA molecules.

### Premature Stop Codons

[0122] Some aspects of the present disclosure provide strategies of editing CCR5 gene to reduce the amount of full-length, functional CCR5 protein being produced. In some embodiments, stop codons may be introduced into the coding sequence of CCR5 gene upstream of the normal stop codon (referred to as a “premature stop codon”). Premature stop codons cause premature translation termination, in turn resulting in truncated and non-functional proteins and induces rapid degradation of the mRNA via the non-sense mediated mRNA decay pathway. See, e.g., Baker et al., Current Opinion in Cell Biology 16 (3): 293-299, 2004; Chang et al., Annual Review of Biochemistry 76: 51-74, 2007; and Behm-Ansmant et al., Genes & Development 20 (4): 391-398, 2006, each of which is incorporated herein by reference.

[0123] The nucleobase editors described herein may be used to convert certain amino acid codons to a stop codon (e.g., TAA, TAG, or TGA). For example, nucleobase editors including a cytosine deaminase domain are capable of converting a cytosine (C) base to a thymine (T) base via deamination. Thus, it is envisioned that, for amino acid codons containing a C base, the C base may be converted to T. For example, a CAG (Gln/Q) codon may be changed to a TAG (amber) codon via the deamination of the first C on the coding strand. For sense codons that contain a guanine (G) base, a C base is present on the complementary strand; and the G base may be converted to an adenosine (A) via the deamination of the C on the complementary strand. For example, a TGG (Trp/W) codon may be converted to a TAG (amber) codon via the deamination of the second C on the complementary strand. In some embodiments, two C to T changes are required to convert a codon to a nonsense codon. For example, a CGG (R) codon is converted to a TAG (amber) codon via the deamination of the first C on the coding strand and the deamination of the second C on the complementary strand. Non-limiting examples of the codon changes contemplated herein are provided in Tables 5, 6, and 10.

[0124] Accordingly, the present disclosure provides non-limiting examples of amino acid codons that may be converted to premature stop codons in the CCR5 gene. In some embodiments, the introduction of stop codons may be efficacious in generating truncations when the target residue is located in a flexible loop. In some embodiments, two codons adjacent to each other may both be converted to stop codons by the action of the cytidine deaminase, resulting in two stop codons adjacent to each other (also referred to as “tandem stop codons”). “Adjacent” means there are no more than 5 amino acids between the two stop codons. For example, the two stop codons may be immediately adjacent to each other (0 amino acids in between) or have 1, 2, 3, 4, or 5 amino acids in between. The introduction of tandem stop codons may be especially efficacious in generating truncation and non-functional CCR5 variants. As a non-limiting example, the tandem stop codons may be: Q186X/Q188X, Q277X/Q288X, Q328X/Q329X, Q329X/R334X, or R341X/Q346X.

### Target Base in Non-Coding Region of CCR5 Gene Splicing Variants

[0125] Some aspects of the present disclosure provide strategies of reducing cellular CCR5 activity via preventing CCR5 mRNA maturation and production. In some embodiments, such strategies involve alterations of splicing sites in the CCR5 gene. Altered splicing site may lead to altered splicing and maturation of the CCR5 mRNA. For example, in some embodiments, an altered splicing site may lead to the skipping of an exon, in turn leading to a truncated protein product or an altered reading frame. In some embodiments, an altered splicing site may lead to translation of an intron sequence and premature translation termination when an inframe stop codon is encountered by the translating ribosome in the intron. In some embodiments, a start codon is edited and protein translation initiates at the next ATG codon, which may not be in the correct coding frame.

[0126] The splicing site typically comprises an intron donor site, a Lariat branch point, and an intron acceptor site. The mechanisms of splicing are familiar to those skilled in the art. As illustrated in Table 2, the intron donor site may have a consensus sequence of GGGTRAGT, and the C bases paired with the G bases in the intron donor site consensus sequence may be targeted by a nucleobase editor described herein, thereby altering the intron donor site. The Lariat branch point also has consensus sequences, e.g., TTGTA. The C base paired with the G base in the Lariat branch point consensus sequence may be targeted by a nucleobase editor described herein, leading to the skipping of the following exon. The intron acceptor site has a consensus sequence of YACAGG, wherein Y is a pyrimidine. The C base of the consensus sequence of the intron acceptor site, and the C base paired with the G bases in the consensus sequence of the intron acceptor site may be targeted by a nucleobase editor described herein, thereby altering the intron acceptor site, in turn leading to the skipping of an exon. General strategies of altering intron-exon junctions and the start site to produce a non-functional CCR5 protein, mimicking the HIV protective effect of the CCR5-Δ32 allele are described in Table 2.

[0127] In some embodiments, a splicing site in the CCR5-coding sequence (e.g., the CCR5 gene in the genome) is altered by a programmable nuclease. The use of a programmable nuclease (e.g., TALE, ZFN, WT Cas9, or dCas9-FokI fusion protein) in generating indels in a target sequence has been described in the art, e.g., in Maeder, et al., Mol. Cell 31 (2): 294-301, 2008; Carroll et al., Genetics Society of America, 188 (4): 773-782, 2011; Miller et al., Nature Biotechnology 25 (7): 778-785, 2007; Christian et al., Genetics 186 (2): 757-61, 2008; Li et al., Nucleic Acids Res 39 (1): 359-372, 2010; and Moscou et al., Science 326 (5959): 1501, 2009, Guilinger et al., Nature Biotechnology 2014, 32 (6). 577-82. PCT Application Publication WO 2015/089427, US Patent Application Publication US 2016-0153003, and US 2015-0291965, the each of which is incorporated herein by reference.

[0128] An “indel” refers to bases inserted or deleted in the DNA of an organism, e.g., the genomic DNA of an organism. An indel may be generated via a non-homologous end joining (NHEJ) pathway following a double-strand DNA break, e.g., by cleavage of a nuclease. During NHEJ, break ends are directly ligated without the need for a homologous template, in contrast to homology directed repair, and is thus prone to generating indels. An indel that occurs in the coding sequence of a gene, will lead to frameshift mutations if the indel is an insertion or a deletion of one or two bases. An indel that occurs in the noncoding sequence of a gene. e.g., the splicing site, may cause skipping of exons or translation of intron sequences, in turn leading to frameshifting mutations and/or premature translation termination. Thus, provided in Tables 1 and 8 are non-limiting examples of splicing sites that may be targeted via programmable nucleases, e.g., WT Cas9 or dCas9-FokI fusion protein, and the guide sequences that may be used for each target site.

### CCR2 Variants

[0129] Certain mutations in the C-C chemokine receptor type 2 (CCR2) have also been shown to protect against HIV infection. Thus, some aspects of the present disclosure provide the generation of loss-of-function variants of CCR2 (e.g., A335V and V64I) using the nucleobase editors and strategies described herein. Non-limiting examples of such variants and the guide sequence that may be used to make them are provided in Table 1.

Wild Type CCR2 Gene (>Gi|183979979|Ref|NM_001123041.2| Homo sapiens C-C Motif Chemokine Receptor 2 (CCR2), Transcript Variant A, mRNA, SEQ ID NO: 332)

TTTATTCTCTGGAACATGAAACATTCTGTTGTGCTCATATCATGCAAATT
ATCACTAGTAGGAGAGCAGAGAGTGGAAATGTTCCAGGTATAAAGACCCA
CAAGATAAAGAAGCTCAGAGTCGTTAGAAACAGGAGCAGATGTACAGGGT
TTGCCTGACTCACACTCAAGGTTGCATAAGCAAGATTTCAAAATTAATCC
TATTCTGGAGACCTCAACCCAATGTACAATGTTCCTGACTGGAAAAGAAG
AACTATATTTTTCTGATTTTTTTTTTCAAATCTTTACCATTAGTTGCCCT
GTATCTCCGCCTTCACTTTCTGCAGGAAACTTTATTTCCTACTTCTGCAT
GCCAAGTTTCTACCTCTAGATCTGTTTGGTTCAGTTGCTGAGAAGCCTGA
CATACCAGGACTGCCTGAGACAAGCCACAAGCTGAACAGAGAAAGTGGAT
TGAACAAGGACGCATTTCCCCAGTACATCCACAACATGCTGTCCACATCT
CGTTCTCGGTTTATCAGAAATACCAACGAGAGCGGTGAAGAAGTCACCAC
CTTTTTTGATTATGATTACGGTGCTCCCTGTCATAAATTTGACGTGAAGC
AAATTGGGGCCCAACTCCTGCCTCCGCTCTACTCGCTGGTGTTCATCTTT
GGTTTTGTGGGCAACATGCTGGTCGTCCTCATCTTAATAAACTGCAAAAA
GCTGAAGTGCTTGACTGACATTTACCTGCTCAACCTGGCCATCTCTGATC
TGCTTTTTCTTATTACTCTCCCATTGTGGGCTCACTCTGCTGCAAATGAG
TGGGTCTTTGGGAATGCAATGTGCAAATTATTCACAGGGCTGTATCACAT
CGGTTATTTTGGCGGAATCTTCTTCATCATCCTCCTGACAATCGATAGAT
ACCTGGCTATTGTCCATGCTGTGTTTGCTTTAAAAGCCAGGACGGTCACC
TTTGGGGTGGTGACAAGTGTGATCACCTGGTTGGTGGCTGTGTTTGCTTC
TGTCCCAGGAATCATCTTTACTAAATGCCAGAAAGAAGATTCTGTTTATG
TCTGTGGCCCTTATTTTCCACGAGGATGGAATAATTTCCACACAATAATG
AGGAACATTTTGGGGCTGGTCCTGCCGCTGCTCATCATGGTCATCTGCTA
CTCGGGAATCCTGAAAACCCTGCTTCGGTGTCGAAACGAGAAGAAGAGGC
ATAGGGCAGTGAGAGTCATCTTCACCATCATGATTGTTTACTTTCTCTTC
TGGACTCCCTATAATATTGTCATTCTCCTGAACACCTTCCAGGAATTCTT
CGGCCTGAGTAACTGTGAAAGCACCAGTCAACTGGACCAAGCCACGCAGG
TGACAGAGACTCTTGGGATGACTCACTGCTGCATCAATCCCATCATCTAT
GCCTTCGTTGGGGAGAAGTTCAGAAGCCTTTTTCACATAGCTCTTGGCTG
TAGGATTGCCCCACTCCAAAAACCAGTGTGTGGAGGTCCAGGAGTGAGAC
CAGGAAAGAATGTGAAAGTGACTACACAAGGACTCCTCGATGGTCGTGGA
AAAGGAAAGTCAATTGGCAGAGCCCCTGAAGCCAGTCTTCAGGACAAAGA
AGGAGCCTAGAGACAGAAATGACAGATCTCTGCTTTGGAAATCACACGTC
TGGCTTCACAGATGTGTGATTCACAGTGTGAATCTTGGTGTCTACGTTAC
CAGGCAGGAAGGCTGAGAGGAGAGAGACTCCAGCTGGGTTGGAAAACAGT
ATTTTCCAAACTACCTTCCAGTTCCTCATTTTTGAATACAGGCATAGAGT
TCAGACTTTTTTTAAATAGTAAAAATAAAATTAAAGCTGAAAACTGCAAC
TTGTAAATGTGGTAAAGAGTTAGTTTGAGTTACTATCATGTCAAACGTGA
AAATGCTGTATTAGTCACAGAGATAATTCTAGCTTTGAGCTTAAGAATTT
TGAGCAGGTGGTATGTTTGGGAGACTGCTGAGTCAACCCAATAGTTGTTG
ATTGGCAGGAGTTGGAAGTGTGTGATCTGTGGGCACATTAGCCTATGTGC
ATGCAGCATCTAAGTAATGATGTCGTTTGAATCACAGTATACGCTCCATC
GCTGTCATCTCAGCTGGATCTCCATTCTCTCAGGCTTGCTGCCAAAAGCC
TTTTGTGTTTTGTTTTGTATCATTATGAAGTCATGCGTTTAATCACATTC
GAGTGTTTCAGTGCTTCGCAGATGTCCTTGATGCTCATATTGTTCCCTAT
TTTGCCAGTGGGAACTCCTAAATCAAGTTGGCTTCTAATCAAAGCTTTTA
AACCCTATTGGTAAAGAATGGAAGGTGGAGAAGCTCCCTGAAGTAAGCAA
AGACTTTCCTCTTAGTCGAGCCAAGTTAAGAATGTTCTTATGTTGCCCAG
TGTGTTTCTGATCTGATGCAAGCAAGAAACACTGGGCTTCTAGAACCAGG
CAACTTGGGAACTAGACTCCCAAGCTGGACTATGGCTCTACTTTCAGGCC
ACATGGCTAAAGAAGGTTTCAGAAAGAAGTGGGGACAGAGCAGAACTTTC
ACCTTCATATATTTGTATGATCCTAATGAATGCATAAAATGTTAAGTTGA
TGGTGATGAAATGTAAATACTGTTTTTAACAACTATGATTTGGAAAATAA
ATCAATGCTATAACTATGTTGAAAAAAAAAAAAAAAAAA

Wild Type CCR2 Gene, Transcript Variant B (>Gi|183979981|Ref|NM_001123396.1| Homo sapiens C-C Motif Chemokine Receptor 2 (CCR2), Transcript Variant B, mRNA. SEQ ID NO: 333)

TTTATTCTCTGGAACATGAAACATTCTGTTGTGCTCATATCATGCAAATT
ATCACTAGTAGGAGAGCAGAGAGTGGAAATGTTCCAGGTATAAAGACCCA
CAAGATAAAGAAGCTCAGAGTCGTTAGAAACAGGAGCAGATGTACAGGGT
TTGCCTGACTCACACTCAAGGTTGCATAAGCAAGATTTCAAAATTAATCC
TATTCTGGAGACCTCAACCCAATGTACAATGTTCCTGACTGGAAAAGAAG
AACTATATTTTTCTGATTTTTTTTTTCAAATCTTTACCATTAGTTGCCCT
GTATCTCCGCCTTCACTTTCTGCAGGAAACTTTATTTCCTACTTCTGCAT
GCCAAGTTTCTACCTCTAGATCTGTTTGGTTCAGTTGCTGAGAAGCCTGA
CATACCAGGACTGCCTGAGACAAGCCACAAGCTGAACAGAGAAAGTGGAT
TGAACAAGGACGCATTTCCCCAGTACATCCACAACATGCTGTCCACATCT
CGTTCTCGGTTTATCAGAAATACCAACGAGAGCGGTGAAGAAGTCACCAC
CTTTTTTGATTATGATTACGGTGCTCCCTGTCATAAATTTGACGTGAAGC
AAATTGGGGCCCAACTCCTGCCTCCGCTCTACTCGCTGGTGTTCATCTTT
GGTTTTGTGGGCAACATGCTGGTCGTCCTCATCTTAATAAACTGCAAAAA
GCTGAAGTGCTTGACTGACATTTACCTGCTCAACCTGGCCATCTCTGATC
TGCTTTTTCTTATTACTCTCCCATTGTGGGCTCACTCTGCTGCAAATGAG
TGGGTCTTTGGGAATGCAATGTGCAAATTATTCACAGGGCTGTATCACAT
CGGTTATTTTGGCGGAATCTTCTTCATCATCCTCCTGACAATCGATAGAT
ACCTGGCTATTGTCCATGCTGTGTTTGCTTTAAAAGCCAGGACGGTCACC
TTTGGGGTGGTGACAAGTGTGATCACCTGGTTGGTGGCTGTGTTTGCTTC
TGTCCCAGGAATCATCTTTACTAAATGCCAGAAAGAAGATTCTGTTTATG
TCTGTGGCCCTTATTTTCCACGAGGATGGAATAATTTCCACACAATAATG
AGGAACATTTTGGGGCTGGTCCTGCCGCTGCTCATCATGGTCATCTGCTA
CTCGGGAATCCTGAAAACCCTGCTTCGGTGTCGAAACGAGAAGAAGAGGC
ATAGGGCAGTGAGAGTCATCTTCACCATCATGATTGTTTACTTTCTCTTC
TGGACTCCCTATAATATTGTCATTCTCCTGAACACCTTCCAGGAATTCTT
CGGCCTGAGTAACTGTGAAAGCACCAGTCAACTGGACCAAGCCACGCAGG
TGACAGAGACTCTTGGGATGACTCACTGCTGCATCAATCCCATCATCTAT
GCCTTCGTTGGGGAGAAGTTCAGAAGGTATCTCTCGGTGTTCTTCCGAAA
GCACATCACCAAGCGCTTCTGCAAACAATGTCCAGTTTTCTACAGGGAGA
CAGTGGATGGAGTGACTTCAACAAACACGCCTTCCACTGGGGAGCAGGAA
GTCTCGGCTGGTTTATAAAACGAGGAGCAGTTTGATTGTTGTTTATAAAG
GGAGATAACAATCTGTATATAACAACAAACTTCAAGGGTTTGTTGAACAA
TAGAAACCTGTAAAGCAGGTGCCCAGGAACCTCAGGGCTGTGTGTACTAA
TACAGACTATGTCACCCAATGCATATCCAACATGTGCTCAGGGAATAATC
CAGAAAAACTGTGGGTAGAGACTTTGACTCTCCAGAAAGCTCATCTCAGC
TCCTGAAAAATGCCTCATTACCTTGTGCTAATCCTCTTTTTCTAGTCTTC
ATAATTTCTTCACTCAATCTCTGATTCTGTCAATGTCTTGAAATCAAGGG
CCAGCTGGAGGTGAAGAAGAGAATGTGACAGGCACAGATGAATGGGAGTG
AGGGATAGTGGGGTCAGGGCTGAGAGGAGAAGGAGGGAGACATGAGCATG
GCTGAGCCTGGACAAAGACAAAGGTGAGCAAAGGGCTCACGCATTCAGCC
AGGAGATGATACTGGTCCTTAGCCCCATCTGCCACGTGTATTTAACCTTG
AAGGGTTCACCAGGTCAGGGAGAGTTTGGGAACTGCAATAACCTGGGAGT
TTTGGTGGAGTCCGATGATTCTCTTTTGCATAAGTGCATGACATATTTTT
GCTTTATTACAGTTTATCTATGGCACCCATGCACCTTACATTTGAAATCT
ATGAAATATCATGCTCCATTGTTCAGATGCTTCTTAGGCCACATCCCCCT
GTCTAAAAATTCAGAAAATTTTTGTTTATAAAAGA

Human CCR2 Isoform A, Amino Acid Sequence (>Gi|183979980|Ref|NP_001116513.2| C-C Chemokine Receptor Type 2 Isoform A [Homo sapiens], SEQ ID NO: 334)

MLSTSRSRFIRNTNESGEEVTTFFDYDYGAPCHKFDVKQIGAQLLPPLYS
LVFIFGFVGNMLVVLILINCKKLKCLTDIYLLNLAISDLLFLITLPLWAH
SAANEWVFGNAMCKLFTGLYHIGYFGGIFFIILLTIDRYLAIVHAVFALK
ARTVTFGVVTSVITWLVAVFASVPGIIFTKCQKEDSVYVCGPYFPRGWNN
FHTIMRNILGLVLPLLIMVICYSGILKTLLRCRNEKKRHRAVRVIFTIMI
VYFLFWTPYNIVILLNTFQEFFGLSNCESTSQLDQATQVTETLGMTHCCI
NPIIYAFVGEKFRSLFHIALGCRIAPLQKPVCGGPGVRPGKNVKVTTQGL
LDGRGKGKSIGRAPEASLQDKEGA

Human CCR2 Isoform B, Amino Acid Sequence (>Gi|183979982|Ref|NP_001116868.1| C-C Chemokine Receptor Type 2 Isoform B [Homo sapiens]. SEQ ID NO: 335)

MLSTSRSRFIRNTNESGEEVTTFFDYDYGAPCHKFDVKQIGAQLLPPLYS
LVFIFGFVGNMLVVLILINCKKLKCLTDIYLLNLAISDLLFLITLPLWAH
SAANEWVFGNAMCKLFTGLYHIGYFGGIFFIILLTIDRYLAIVHAVFALK
ARTVTFGVVTSVITWLVAVFASVPGIIFTKCQKEDSVYVCGPYFPRGWNN
FHTIMRNILGLVLPLLIMVICYSGILKTLLRCRNEKKRHRAVRVIFTIMI
VYFLFWTPYNIVILLNTFQEFFGLSNCESTSQLDQATQVTETLGMTHCCI
NPIIYAFVGEKFRRYLSVFFRKHITKRFCKQCPVFYRETVDGVTSTNTPS
TGEQEVSAGL

Mouse CCR2 Amino Acid Sequence (>Gi|6753466|Ref|NP_034045.1| C-C Chemokine Receptor Type 2 [Mus musculus]. SEQ ID NO: 336)

MEDNNMLPQFIHGILSTSHSLFTRSIQELDEGATTPYDYDDGEPCHKTSV
KQIGAWILPPLYSLVFIFGFVGNMLVIIILIGCKKLKSMTDIYLLNLAIS
DLLFLLTLPFWAHYAANEWVFGNIMCKVFTGLYHIGYFGGIFFIILLTID
RYLAIVHAVFALKARTVTFGVITSVVTWVVAVFASLPGIIFTKSKQDDHH
YTCGPYFTQLWKNFQTIMRNILSLILPLLVMVICYSGILHTLFRCRNEKK
RHRAVRLIFAIMIVYFLFWTPYNIVLFLTTFQESLGMSNCVIDKHLDQAM
QVTETLGMTHCCINPVIYAFVGEKFRRYLSIFFRKHIAKRLCKQCPVFYR
ETADRVSSTFTPSTGEQEVSVGL

Rat CCR2 Amino Acid Sequence (>Gi|11177914|Ref|NP_068638.1| C-C Chemokine Receptor Type 2 [Rattus norvegicus], SEQ ID NO: 337)

MEDSNMLPQFIHGILSTSHSLFPRSIQELDEGATTPYDYDDGEPCHKTSV
KQIGAWILPPLYSLVFIFGFVGNMLVIIILISCKKLKSMTDIYLFNLAIS
DLLFLLTLPFWAHYAANEWVFGNIMCKLFTGLYHIGYFGGIFFIILLTID
RYLAIVHAVFALKARTVTFGVITSVVTWVVAVFASLPGIIFTKSEQEDDQ
HTCGPYFPTIWKNFQTIMRNILSLILPLLVMVICYSGILHTLFRCRNEKK
RHRAVRLIFAIMIVYFLFWTPYNIVLFLTTFQEFLGMSNCVVDMHLDQAM
QVTETLGMTHCCVNPIIYAFVGEKFRRYLSIFFRKHIAKNLCKQCPVFYR
ETADRVSSTFTPSTGEQEVSVGL

[0130] In some embodiments, simultaneous introduction of loss-of-function mutations into more than one protein factor affecting HIV infection are provided. For example, in some embodiments, a loss-of-function mutation may be simultaneously introduced into CCR5 and CCR2. In some embodiments to simultaneously introduce loss-of-function mutations into more than one protein, multiple guide nucleotide sequences are used. In some embodiments a guide nucleotide matching both gene sequences is used to simultaneously introduce loss-of-function mutations into more than one protein. In some embodiments a guide nucleotide partially matching one or both of the gene sequences is used to simultaneously introduce loss-of-function mutations into more than one protein, wherein one to four mistmatches are allowed between the guide RNA and a target sequence.

[0131] Further provided herein are the generation of novel and uncharacterized mutations in any of the protein factors involved in HIV infection. For example, libraries of guide nucleotide sequences may be designed for all possible PAM sequences in the genomic site of these protein factors, and used to generate mutations in these proteins. The function of the protein variants may be evaluated. If a loss-of-function variant is identified, the specific gRNA used for making the mutation may be identified via sequencing of the edited genomic site, e.g., via DNA deep sequencing.

### Nucleobase Editors

[0132] The methods of generating loss-of-function CCR5 variants described herein are enabled by the use of the nucleobase editors. As described herein, a nucleobase editor is a fusion protein comprising: (i) a programmable DNA binding protein domain; and (ii) a deaminase domain. It is to be understood that any programmable DNA binding domain may be used in the base editors.

[0133] In some embodiments, the programmable DNA binding protein domain comprises the DNA binding domain of a zinc finger nuclease (ZFN) or a transcription activator-like effector domain (TALE). In some embodiments, the programmable DNA binding protein domain may be programmed by a guide nucleotide sequence and is thus referred as a “guide nucleotide sequence-programmable DNA binding-protein domain.” In some embodiments, the guide nucleotide sequence-programmable DNA binding protein is a nuclease inactive Cas9, or dCas9. A dCas9, as used herein, encompasses a Cas9 that is completely inactive in its nuclease activity, or partially inactive in its nuclease activity (e.g., a Cas9 nickase). Thus, in some embodiments, the guide nucleotide sequence-programmable DNA binding protein is a Cas9 nickase. In some embodiments, the guide nucleotide sequence-programmable DNA binding protein is a nuclease inactive Cpf1. In some embodiments, the guide nucleotide sequence-programmable DNA binding protein is a nuclease inactive Argonaute.

[0134] In some embodiments, the guide nucleotide sequence-programmable DNA binding protein is a dCas9 domain. In some embodiments, the guide nucleotide sequence-programmable DNA binding protein is a Cas9 nickase. In some embodiments, the dCas9 domain comprises an amino acid sequence of SEQ ID NO: 2 or SEQ ID NO: 3. In some embodiments, the dCas9 domain comprises an amino acid sequence that is at least 60%, at least 65%, at least 70%, at least 75%, at least 80%, at least 85%, at least 90%, at least 91%, at least 92%, at least 93%, at least 94%, at least 95%, at least 96%, at least 97%, at least 98%, at least 99%, or at least 99.5% identical to any one of the Cas9 domains provided herein (e.g., SEQ ID NOs: 1-260, 270-292, 315-323, 680, or 682), and comprises mutations corresponding to DIOX (X is any amino acid except for D) and/or H840X (X is any amino acid except for H) in SEQ ID NO: 1. In some embodiments, the dCas9 domain comprises an amino acid sequence that is at least 60%, at least 65%, at least 70%, at least 75%, at least 80%, at least 85%, at least 90%, at least 91%, at least 92%, at least 93%, at least 94%, at least 95%, at least 96%, at least 97%, at least 98%, at least 99%, or at least 99.5% identical to any one of the Cas9 domains provided herein (e.g., SEQ ID NOs: 1-260, 270-292, 315-323, 680, or 682), and comprises mutations corresponding to D10A and/or H840A in SEQ ID NO: 1. In some embodiments, the Cas9 nickase comprises an amino acid sequence that is at least 60%, at least 65%, at least 70%, at least 75%, at least 80%, at least 85%, at least 90%, at least 91%, at least 92%, at least 93%, at least 94%, at least 95%, at least 96%, at least 97%, at least 98%, at least 99%, or at least 99.5% identical to any one of the Cas9 domains provided herein (e.g., SEQ ID NOs: 1-260, 270-292, 315-323, 680, or 682), and comprises mutations corresponding to D10X (X is any amino acid except for D) in SEQ ID NO: 1 and a histidine at a position correspond to position 840 in SEQ ID NO: 1. In some embodiments, the Cas9 nickase comprises an amino acid sequence that is at least 60%, at least 65%, at least 70%, at least 75%, at least 80%, at least 85%, at least 90%, at least 91%, at least 92%, at least 93%, at least 94%, at least 95%, at least 96%, at least 97%, at least 98%, at least 99%, or at least 99.5% identical to any one of the Cas9 domains provided herein (e.g., SEQ ID NOs: 1-260, 270-292, 315-323, 680, or 682), and comprises mutations corresponding to D10A in SEQ ID NO: 1 and a histidine at a position correspond to position 840 in SEQ ID NO: 1. In some embodiments, variants or homologues of dCas9 or Cas9 nickase (e.g., variants of SEQ ID NO: 2 or SEQ ID NO: 3, respectively) are provided which are at least about 70% identical, at least about 80% identical, at least about 90% identical, at least about 95% identical, at least about 98% identical, at least about 99% identical, at least about 99.5% identical, or at least about 99.9% identical to SEQ ID NO: 2 or SEQ ID NO: 3, respectively, and comprises mutations corresponding to D10A and/or H840A in SEQ ID NO: 1. In some embodiments, variants of Cas9 (e.g., variants of SEQ ID NO: 2) are provided having amino acid sequences which are shorter, or longer than SEQ ID NO: 2, by about 5 amino acids, by about 10 amino acids, by about 15 amino acids, by about 20 amino acids, by about 25 amino acids, by about 30 amino acids, by about 40 amino acids, by about 50 amino acids, by about 75 amino acids, by about 100 amino acids, or more, provided that the dCas9 variants comprise mutations corresponding to D10A and/or H840A in SEQ ID NO: 1. In some embodiments, variants of Cas9 nickase (e.g., variants of SEQ ID NO: 3) are provided having amino acid sequences which are shorter, or longer than SEQ ID NO: 3, by about 5 amino acids, by about 10 amino acids, by about 15 amino acids, by about 20 amino acids, by about 25 amino acids, by about 30 amino acids, by about 40 amino acids, by about 50 amino acids, by about 75 amino acids, by about 100 amino acids, or more, provided that the dCas9 variants comprise mutations corresponding to D10A and comprises a histidine at a position corresponding to position 840 in SEQ ID NO: 1.

[0135] Additional suitable nuclease-inactive dCas9 domains will be apparent to those of skill in the art based on this disclosure and knowledge in the field, and are within the scope of this disclosure. Such additional exemplary suitable nuclease-inactive Cas9 domains include, but are not limited to, D10A/H840A, D10A/D839A/H840A, D10A/D839A/H840A/N863A mutant domains in SEQ ID NO: 1 (See, e.g., Prashant et al., Nature Biotechnology, 2013; 31(9): 833-838, which is incorporated herein by reference), or K603R (See, e.g., Chavez et al., Nature Methods 12, 326-328, 2015, which is incorporated herein by reference).

[0136] In some embodiments, the nucleobase editors described herein comprise a Cas9 domain with decreased electrostatic interactions between the Cas9 domain and a sugar-phosphate backbone of a DNA, as compared to a wild-type Cas9 domain. In some embodiments, a Cas9 domain comprises one or more mutations that decreases the association between the Cas9 domain and a sugar-phosphate backbone of a DNA. In some embodiments, the nucleobase editors described herein comprises a dCas9 (e.g., with D10A and H840A mutations in SEQ ID NO: 1) or a Cas9 nickase (e.g., with D10A mutation in SEQ ID NO: 1), wherein the dCas9 or the Cas9 nickase further comprises one or more of a N497X, a R661X, a Q695X, and/or a Q926X mutation of the amino acid sequence provided in SEQ ID NO: 1, or a corresponding mutation in any of the amino acid sequences provided in SEQ ID NOs: 11-260, wherein X is any amino acid. In some embodiments, the nucleobase editors described herein comprises a dCas9 (e.g., with D10A and H840A mutations in SEQ ID NO: 1) or a Cas9 nickase (e.g., with D10A mutation in SEQ ID NO: 1), wherein the dCas9 or the Cas9 nickase further comprises one or more of a N497A, a R661A, a Q695A, and/or a Q926A mutation of the amino acid sequence provided in SEQ ID NO: 1, or a corresponding mutation in any of the amino acid sequences provided in SEQ ID NOs: 11-260. In some embodiments, the Cas9 domain (e.g., of any of the nucleobase editors provided herein) comprises the amino acid sequence as set forth in SEQ ID NO: 338. In some embodiments, the nucleobase editor comprises the amino acid sequence as set forth in SEQ ID NO: 339.

Cas9 Variant with Decreased Electrostatic Interactions Between the Cas9 and DNA Backbone

DKKYSIGLAIGTNSVGWAVITDEYKVPSKKFKVLGNTDRHSIKKNLIGAL
LFDSGETALATRLKRTARRRYTRRKNRICYLQEIFSNEMAKVDDSFFHRL
EESFLVEEDKKHERHPIFGNIVDEVAYHEKYPTIYHLRKKLVDSTDKADL
RLIYLALAHMIKFRGHFLIEGDLNPDNSDVDKLFIQLVQTYNQLFEENPI
NASGVDAKAILSARLSKSRRLENLIAQLPGEKKNGLFGNLIALSLGLTPN
FKSNFDLAEDAKLQLSKDTYDDDLDNLLAQIGDQYADLFLAAKNLSDAIL
LSDILRVNTEITKAPLSASMIKRYDEHHQDLTLLKALVRQQLPEKYKEIF
FDQSKNGYAGYIDGGASQEEFYKFIKPILEKMDGTEELLVKLNREDLLRK
QRTFDNGSIPHQIHLGELHAILRRQEDFYPFLKDNREKIEKILTFRIPYY
VGPLARGNSRFAWMTRKSEETITPWNFEEVVDKGASAQSFIERMTAFDKN
LPNEKVLPKHSLLYEYFTVYNELTKVKYVTEGMRKPAFLSGEQKKAIVDL
LFKTNRKVTVKQLKEDYFKKIECFDSVEISGVEDRFNASLGTYHDLLKDA
KDKDFLDNEENEDILEDIVLTLTLFEDREMIEERLKTYAHLFDDKVMKQL
KRRRYTGWGALSRKLINGIRDKQSGKTILDFLKSDGFANRNFMALIHDDS
LTFKEDIQKAQVSGQGDSLHEHIANLAGSPAIKKGILQTVKVVDELVKVM
GRHKPENIVIEMARENQTTQKGQKNSRERMKRIEEGIKELGSQILKEHPV
ENTQLQNEKLYLYYLQNGRDMYVDQELDINRLSDYDVDHIVPQSFLKDDS
IDNKVLTRSDKNRGKSDNVPSEEVVKKMKNYWRQLLNAKLITQRKFDNLT
KAERGGLSELDKAGFIKRQLVETRAITKHVAQILDSRMNTKYDENDKLIR
EVKVITLKSKLVSDFRKDFQFYKVREINNYHHAHDAYLNAVVGTALIKKY
PKLESEFVYGDYKVYDVRKMIAKSEQEIGKATAKYFFYSNIMNFFKTEIT
LANGEIRKRPLIETNGETGEIVWDKGRDFATVRKVLSMPQVNIVKKTEVQ
TGGFSKESILPKRNSDKLIARKKDWDPKKYGGFDSPTVAYSVLVVAKVEK
GKSKKLKSVKELLGITIMERSSFEKNPIDFLEAKGYKEVKKDLIIKLPKY
SLFELENGRKRMLASAGELQKGNELALPSKYVNFLYLASHYEKLKGSPED
NEQKQLFVEQHKHYLDEIIEQISEFSKRVILADANLDKVLSAYNKHRDKP
IREQAENIIHLFTLTNLGAPAAFKYFDTTIDRKRYTSTKEVLDATLIHQS
ITGLYETRIDLSQLGGD (SEQ ID NO: 338, mutations
relative to SEQ ID NO: 1 are bolded and underlined)

### High Fidelity Nucleobase Editor (HF-BE3)

(SEQ ID NO: 339)
MSSETGPVAVDPTLRRRIEPHEFEVFFDPRELRKETCLLYEINWGGRHSI
WRHTSQNTNKHVEVNFIEKFTTERYFCPNTRCSITWFLSWSPCGECSRAI
TEFLSRYPHVTLFIYIARLYHHADPRNRQGLRDLISSGVTIQIMTEQESG
YCWRNFVNYSPSNEAHWPRYPHLWVRLYVLELYCIILGLPPCLNILRRKQ
PQLTFFTIALQSCHYQRLPPHILWATGLKSGSETPGTSESATPESDKKYS
IGLAIGTNSVGWAVITDEYKVPSKKFKVLGNTDRHSIKKNLIGALLFDSG
ETAEATRLKRTARRRYTRRKNRICYLQEIFSNEMAKVDDSFFHRLEESFL
VEEDKKHERHPIFGNIVDEVAYHEKYPTIYHLRKKLVDSTDKADLRLIYL
ALAHMIKFRGHFLIEGDLNPDNSDVDKLFIQLVQTYNQLFEENPINASGV
DAKAILSARLSKSRRLENLIAQLPGEKKNGLFGNLIALSLGLTPNFKSNF
DLAEDAKLQLSKDTYDDDLDNLLAQIGDQYADLFLAAKNLSDAILLSDIL
RVNTEITKAPLSASMIKRYDEHHQDLTLLKALVRQQLPEKYKEIFFDQSK
NGYAGYIDGGASQEEFYKFIKPILEKMDGTEELLVKLNREDLLRKQRTFD
NGSIPHQIHLGELHAILRRQEDFYPFLKDNREKIEKILTFRIPYYVGPLA
RGNSRFAWMTRKSEETITPWNFEEVVDKGASAQSFIERMTAFDKNLPNEK
VLPKHSLLYEYFTVYNELTKVKYVTEGMRKPAFLSGEQKKAIVDLLFKTN
RKVTVKQLKEDYFKKIECFDSVEISGVEDRFNASLGTYHDLLKIIKDKDF
LDNEENEDILEDIVLTLTLFEDREMIEERLKTYAHLFDDKVMKQLKRRRY
TGWGALSRKLINGIRDKQSGKTILDFLKSDGFANRNFMALIHDDSLTFKE
DIQKAQVSGQGDSLHEHIANLAGSPAIKKGILQTVKVVDELVKVMGRHKP
ENIVIEMARENQTTQKGQKNSRERMKRIEEGIKELGSQILKEHPVENTQL
QNEKLYLYYLQNGRDMYVDQELDINRLSDYDVDHIVPQSFLKDDSIDNKV
LTRSDKNRGKSDNVPSEEVVKKMKNYWRQLLNAKLITQRKFDNLTKAERG
GLSELDKAGFIKRQLVETRAITKHVAQILDSRMNTKYDENDKLIREVKVI
TLKSKLVSDFRKDFQFYKVREINNYHHAHDAYLNAVVGTALIKKYPKLES
EFVYGDYKVYDVRKMIAKSEQEIGKATAKYFFYSNIMNFFKTEITLANGE
IRKRPLIETNGETGEIVWDKGRDFATVRKVLSMPQVNIVKKTEVQTGGFS
KESILPKRNSDKLIARKKDWDPKKYGGFDSPTVAYSVLVVAKVEKGKSKK
LKSVKELLGITIMERSSFEKNPIDFLEAKGYKEVKKDLIIKLPKYSLFEL
ENGRKRMLASAGELQKGNELALPSKYVNFLYLASHYEKLKGSPEDNEQKQ
LFVEQHKHYLDEIIEQISEFSKRVILADANLDKVLSAYNKHRDKPIREQA
ENIIHLFTLTNLGAPAAFKYFDTTIDRKRYTSTKEVLDATLIHQSITGLY
ETRIDLSQLGGD

[0138] The Cas9 protein recognizes a short motif (PAM motif) within the target DNA sequence, which is required for the Cas9-DNA interaction but that is not determined by complementarity to the guide RNA nucleotide sequence. A “PAM motif” or “protospacer adjacent motif,” as used herein, refers to a DNA sequence adjacent to the 5′- or 3′-immediately following the DNA sequence that is complementary to the guide RNA oligonucleotide sequence. Cas9 will not successfully bind to, cleave, or nick the target DNA sequence if it is not followed by an appropriate PAM sequence. Without wishing to be bound by any particular theory, specific amino acid residues in the Cas9 enzyme are responsible for interacting with the bases of the PAM and determine the PAM specificity. Therefore, changes in these residues or nearby residues leads to a different or relaxed PAM specificity. Changing or relaxing the PAM specificity may shift the places where Cas9 can bind on the CCR5 gene sequence, and it may modify the target window available to the fused cytidine deaminase, as it will be apparent to those of skill in the art based on the instant disclosure.

[0139] Wild-type Streptococcus pyogenes Cas9 recognizes a canonical PAM sequence (5′-NGG-3′). Other Cas9 nucleases (e.g., Cas9 from Streptococcus thermophiles, Staphylococcus aureus, Neisseria meningitidis, or Treponema denticolaor) and Cas9 variants thereof have been described in the art to have different, or more relaxed PAM requirements. For example, in Kleinstiver et al., Nature 523, 481-485, 2015; Klenstiver et al., Nature 529, 490-495, 2016; Ran et al., Nature, April 9; 520(7546): 186-191, 2015; Kleinstiver et al., Nat Biotechnol. 33(12):1293-1298, 2015; Hou et al., Proc Natl Acad Sci USA, 110(39):15644-9, 2014; Prykhozhij et al., PLoS One, 10(3): e0119372, 2015; Zetsche et al., Cell 163, 759-771, 2015; Gao et al., Nature Biotechnology, doi:10.1038/nbt.3547, 2016; Want et al., Nature 461, 754-761, 2009; Chavez et al., doi: dx.doi dot org/10.1101/058974; Fagerlund et al., Genonme Biol. 2015; 16: 25, 2015; Zetsche et al., Cell, 163, 759-771, 2015: and Swarts et al., Nat Struct Mol Biol. 21(9):743-53, 2014, each of which is incorporated herein by reference.

[0140] Thus, the guide nucleotide sequence-programmable DNA-binding protein of the present disclosure may recognize a variety of PAM sequences including, without limitation PAM sequences that are on the 3′ or the 5′ end of the DNA sequence determined by the guide RNA. For example, the sequence may be: NGG, NGAN, NGNG, NGAG, NGCG, NNGRRT, NGRRN, NNNRRT, NNNGATT, NNAGAAW, NAAAC, TTN, TTTN, and YTN, wherein Y is a pyrimidine, R is a purine, and N is any nucleobase.

[0141] One example of an RNA-programmable DNA-binding protein that has different PAM specificity is Clustered Regularly Interspaced Short Palindromic Repeats from Prevotella and Francisella 1 (Cpf1). Similar to Cas9, Cpf1 is also a class 2 CRISPR effector. It has been shown that Cpf1 mediates robust DNA interference with features distinct from Cas9. Cpf1 is a single RNA-guided endonuclease lacking tracrRNA, and it may utilize a T-rich protospacer-adjacent motif (e.g., TTN, TTTN, or YTN), which is on the 5′-end of the DNA sequence determined by the guide RNA. Moreover, Cpf1 cleaves DNA via a staggered DNA double-stranded break. Out of 16 Cpf1-family proteins, two enzymes from Acidaminococcus and Lachnospiraceae are shown to have efficient genome-editing activity in human cells.

[0142] Also useful in the present compositions and methods are nuclease-inactive Cpf1 (dCpf1) variants that may be used as a guide nucleotide sequence-programmable DNA-binding protein domain. The Cpf1 protein has a RuvC-like endonuclease domain that is similar to the RuvC domain of Cas9 but does not have a HNH endonuclease domain, and the N-terminal of Cpf1 does not have the alfa-helical recognition lobe of Cas9. It was shown in Zetsche et al., Cell, 163, 759-771, 2015 (which is incorporated herein by reference) that, the RuvC-like domain of Cpf1 is responsible for cleaving both DNA strands and inactivation of the RuvC-like domain inactivates Cpf1 nuclease activity. For example, mutations corresponding to D917A. E1006A, or D1255A in Francisella novicida Cpf1 (SEQ ID NO: 340) inactivates Cpf1 nuclease activity. In some embodiments, the dCpf1 of the present disclosure may comprise mutations corresponding to D917A, E1006A, D1255A, D917A/E1006A, D917A/D1255A, E1006A/D1255A, or D917A/E1006A/D1255A in SEQ ID NO: 340. In other embodiments, the Cpf1 nickase of the present disclosure may comprise mutations corresponding to D917A, E1006A, D1255A, D917A/E1006A, D917A/D1255A. E1006A/D1255A, or D917A/E1006A/D1255A in SEQ ID NO: 340. A Cpf1 nickase useful for the embodiments of the instant disclosure may comprise other mutations and/or further mutations known in the field. It is to be understood that any mutations, e.g., substitution mutations, deletions, or insertions that fully or partially inactivates the RuvC domain of Cpf1 may be used in accordance with the present disclosure, and that these mutations of Cpf1 may result in, for example, a dCpf1 or Cpf1 nickase.

[0143] Thus, in some embodiments, the guide nucleotide sequence-programmable DNA binding protein is a nuclease inactive Cpf1 (dCpf1). In some embodiments, the dCpf1 comprises an amino acid sequence of any one SEQ ID NOs: 340-347. In some embodiments, the dCpf1 comprises an amino acid sequence that is at least 85%, at least 90%, at least 91%, at least 92%, at least 93%, at least 94%, at least 95%, at least 96%, at least 97%, at least 98%, at least 99%, or at ease 99.5% identical to any one of SEQ ID NOs: 340-347, and comprises mutations corresponding to D917A, E1006A, D1255A, D917A/E1006A, D917A/D1255A, E1006A/D1255A, or D917A/E1006A/D1255A in SEQ ID NO: 340. Cpf1 from other bacterial species may also be used in accordance with the present disclosure, as a dCpf1 or Cpf1 nickase.

Wild Type Francisella novicida Cpf1 (SEQ ID NO: 340) (D917. E1006, and D1255 are Bolded and Underlined)

MSIYQEFVNKYSLSKTLRFELIPQGKTLENIKARGLILDDEKRAKDYKKA
KQIIDKYHQFFIEEILSSVCISEDLLQNYSDVYFKLKKSDDDNLQKDFKS
AKDTIKKQISEYIKDSEKFKNLFNQNLIDAKKGQESDLILWLKQSKDNGI
ELFKANSDITDIDEALEIIKSFKGWTTYFKGFHENRKNVYSSNDIPTSII
YRIVDDNLPKFLENKAKYESLKDKAPEAINYEQIKKDLAEELTFDIDYKT
SEVNQRVFSLDEVFEIANFNNYLNQSGITKFNTIIGGKFVNGENTKRKGI
NEYINLYSQQINDKTLKKYKMSVLFKQILSDTESKSFVIDKLEDDSDVVT
TMQSFYEQIAAFKTVEEKSIKETLSLLFDDLKAQKLDLSKIYFKNDKSLT
DLSQQVFDDYSVIGTAVLEYITQQIAPKNLDNPSKKEQELIAKKTEKAKY
LSLETIKLALEEFNKHRDIDKQCRFEEILANFAAIPMIFDEIAQNKDNLA
QISIKYQNQGKKDLLQASAEDDVKAIKDLLDQTNNLLHKLKIFHISQSED
KANILDKDEHFYLVFEECYFELANIVPLYNKIRNYITQKPYSDEKFKLNF
ENSTLANGWDKNKEPDNTAILFIKDDKYYLGVMNKKNNKIFDDKAIKENK
GEGYKKIVYKLLPGANKMLPKVFFSAKSIKFYNPSEDILRIRNHSTHTKN
GSPQKGYEKFEFNIEDCRKFIDFYKQSISKHPEWKDFGFRFSDTQRYNSI
DEFYREVENQGYKLTFENISESYIDSVVNQGKLYLFQIYNKDFSAYSKGR
PNLHTLYWKALFDERNLQDVVYKLNGEAELFYRKQSIPKKITHPAKEAIA
NKNKDNPKKESVFEYDLIKDKRFTEDKFFFHCPITINFKSSGANKFNDEI
NLLLKEKANDVHILSIDRGERHLAYYTLVDGKGNIIKQDTFNIIGNDRMK
TNYHDKLAAIEKDRDSARKDWKKINNIKEMKEGYLSQVVHEIAKLVIEYN
AIVVFEDLNFGFKRGRFKVEKQVYQKLEKMLIEKLNYLVFKDNEFDKTGG
VLRAYQLTAPFETFKKMGKQTGIIYYVPAGFTSKICPVTGFVNQLYPKYE
SVSKSQEFFSKFDKICYNLDKGYFEFSFDYKNFGDKAAKGKWTIASFGSR
LINFRNSDKNHNWDTREVYPTKELEKLLKDYSIEYGHGECIKAAICGESD
KKFFAKLTSVLNTILQMRNSKTGTELDYLISPVADVNGNFFDSRQAPKNM
PQDADANGAYHIGLKGLMLLGRIKNNQEGKKLNLVIKNEEYFEFVQNRNN

Francisella novicida Cpf1 D917A (SEQ ID NO: 341) (A917, E1006, and D1255 are Bolded and Underlined)

MSIYQEFVNKYSLSKTLRFELIPQGKTLENIKARGLILDDEKRAKDYKKA
KQIIDKYHQFFIEEILSSVCISEDLLQNYSDVYFKLKKSDDDNLQKDFKS
AKDTIKKQISEYIKDSEKFKNLFNQNLIDAKKGQESDLILWLKQSKDNGI
ELFKANSDITDIDEALEIIKSFKGWTTYFKGFHENRKNVYSSNDIPTSII
YRIVDDNLPKFLENKAKYESLKDKAPEAINYEQIKKDLAEELTFDIDYKT
SEVNQRVFSLDEVFEIANFNNYLNQSGITKFNTIIGGKFVNGENTKRKGI
NEYINLYSQQINDKTLKKYKMSVLFKQILSDTESKSFVIDKLEDDSDVVT
TMQSFYEQIAAFKTVEEKSIKETLSLLFDDLKAQKLDLSKIYFKNDKSLT
DLSQQVFDDYSVIGTAVLEYITQQIAPKNLDNPSKKEQELIAKKTEKAKY
LSLETIKLALEEFNKHRDIDKQCRFEEILANFAAIPMIFDEIAQNKDNLA
QISIKYQNQGKKDLLQASAEDDVKAIKDLLDQTNNLLHKLKIFHISQSED
KANILDKDEHFYLVFEECYFELANIVPLYNKIRNYITQKPYSDEKFKLNF
ENSTLANGWDKNKEPDNTAILFIKDDKYYLGVMNKKNNKIFDDKAIKENK
GEGYKKIVYKLLPGANKMLPKVFFSAKSIKFYNPSEDILRIRNHSTHTKN
GSPQKGYEKFEFNIEDCRKFIDFYKQSISKHPEWKDFGFRFSDTQRYNSI
DEFYREVENQGYKLTFENISESYIDSVVNQGKLYLFQIYNKDFSAYSKGR
PNLHTLYWKALFDERNLQDVVYKLNGEAELFYRKQSIPKKITHPAKEAIA
NKNKDNPKKESVFEYDLIKDKRFTEDKFFFHCPITINFKSSGANKFNDEI
NLLLKEKANDVHILSIARGERHLAYYTLVDGKGNIIKQDTFNIIGNDRMK
TNYHDKLAAIEKDRDSARKDWKKINNIKEMKEGYLSQVVHEIAKLVIEYN
AIVVFEDLNFGFKRGRFKVEKQVYQKLEKMLIEKLNYLVFKDNEFDKTGG
VLRAYQLTAPFETFKKMGKQTGIIYYVPAGFTSKICPVTGFVNQLYPKYE
SVSKSQEFFSKFDKICYNLDKGYFEFSFDYKNFGDKAAKGKWTIASFGSR
LINFRNSDKNHNWDTREVYPTKELEKLLKDYSIEYGHGECIKAAICGESD
KKFFAKLTSVLNTILQMRNSKTGTELDYLISPVADVNGNFFDSRQAPKNM
PQDADANGAYHIGLKGLMLLGRIKNNQEGKKLNLVIKNEEYFEFVQNRNN

Francisella novicida Cpf1 E1006A (SEQ ID NO: 342) (D917, A1006, and D1255 are Bolded and Underlined)

MSIYQEFVNKYSLSKTLRFELIPQGKTLENIKARGLILDDEKRAKDYKKA
KQIIDKYHQFFIEEILSSVCISEDLLQNYSDVYFKLKKSDDDNLQKDFKS
AKDTIKKQISEYIKDSEKFKNLFNQNLIDAKKGQESDLILWLKQSKDNGI
ELFKANSDITDIDEALEIIKSFKGWTTYFKGFHENRKNVYSSNDIPTSII
YRIVDDNLPKFLENKAKYESLKDKAPEAINYEQIKKDLAEELTFDIDYKT
SEVNQRVFSLDEVFEIANFNNYLNQSGITKFNTIIGGKFVNGENTKRKGI
NEYINLYSQQINDKTLKKYKMSVLFKQILSDTESKSFVIDKLEDDSDVVT
TMQSFYEQIAAFKTVEEKSIKETLSLLFDDLKAQKLDLSKIYFKNDKSLT
DLSQQVFDDYSVIGTAVLEYITQQIAPKNLDNPSKKEQELIAKKTEKAKY
LSLETIKLALEEFNKHRDIDKQCRFEEILANFAAIPMIFDEIAQNKDNLA
QISIKYQNQGKKDLLQASAEDDVKAIKDLLDQTNNLLHKLKIFHISQSED
KANILDKDEHFYLVFEECYFELANIVPLYNKIRNYITQKPYSDEKFKLNF
ENSTLANGWDKNKEPDNTAILFIKDDKYYLGVMNKKNNKIFDDKAIKENK
GEGYKKIVYKLLPGANKMLPKVFFSAKSIKFYNPSEDILRIRNHSTHTKN
GSPQKGYEKFEFNIEDCRKFIDFYKQSISKHPEWKDFGFRFSDTQRYNSI
DEFYREVENQGYKLTFENISESYIDSVVNQGKLYLFQIYNKDFSAYSKGR
PNLHTLYWKALFDERNLQDVVYKLNGEAELFYRKQSIPKKITHPAKEAIA
NKNKDNPKKESVFEYDLIKDKRFTEDKFFFHCPITINFKSSGANKFNDEI
NLLLKEKANDVHILSIDRGERHLAYYTLVDGKGNIIKQDTFNIIGNDRMK
TNYHDKLAAIEKDRDSARKDWKKINNIKEMKEGYLSQVVHEIAKLVIEYN
AIVVFADLNFGFKRGRFKVEKQVYQKLEKMLIEKLNYLVFKDNEFDKTGG
VLRAYQLTAPFETFKKMGKQTGIIYYVPAGFTSKICPVTGFVNQLYPKYE
SVSKSQEFFSKFDKICYNLDKGYFEFSFDYKNFGDKAAKGKWTIASFGSR
LINFRNSDKNHNWDTREVYPTKELEKLLKDYSIEYGHGECIKAAICGESD
KKFFAKLTSVLNTILQMRNSKTGTELDYLISPVADVNGNFFDSRQAPKNM
PQDADANGAYHIGLKGLMLLGRIKNNQEGKKLNLVIKNEEYFEFVQNRNN

Francisella novicida Cpf1 D1255A (SEQ ID NO: 343) (D917, E1006, and A1255 are Bolded and Underlined)

MSIYQEFVNKYSLSKTLRFELIPQGKTLENIKARGLILDDEKRAKDYKKA
KQIIDKYHQFFIEEILSSVCISEDLLQNYSDVYFKLKKSDDDNLQKDFKS
AKDTIKKQISEYIKDSEKFKNLFNQNLIDAKKGQESDLILWLKQSKDNGI
ELFKANSDITDIDEALEIIKSFKGWTTYFKGFHENRKNVYSSNDIPTSII
YRIVDDNLPKFLENKAKYESLKDKAPEAINYEQIKKDLAEELTFDIDYKT
SEVNQRVFSLDEVFEIANFNNYLNQSGITKFNTIIGGKFVNGENTKRKGI
NEYINLYSQQINDKTLKKYKMSVLFKQILSDTESKSFVIDKLEDDSDVVT
TMQSFYEQIAAFKTVEEKSIKETLSLLFDDLKAQKLDLSKIYFKNDKSLT
DLSQQVFDDYSVIGTAVLEYITQQIAPKNLDNPSKKEQELIAKKTEKAKY
LSLETIKLALEEFNKHRDIDKQCRFEEILANFAAIPMIFDEIAQNKDNLA
QISIKYQNQGKKDLLQASAEDDVKAIKDLLDQTNNLLHKLKIFHISQSED
KANILDKDEHFYLVFEECYFELANIVPLYNKIRNYITQKPYSDEKFKLNF
ENSTLANGWDKNKEPDNTAILFIKDDKYYLGVMNKKNNKIFDDKAIKENK
GEGYKKIVYKLLPGANKMLPKVFFSAKSIKFYNPSEDILRIRNHSTHTKN
GSPQKGYEKFEFNIEDCRKFIDFYKQSISKHPEWKDFGFRFSDTQRYNSI
DEFYREVENQGYKLTFENISESYIDSVVNQGKLYLFQIYNKDFSAYSKGR
PNLHTLYWKALFDERNLQDVVYKLNGEAELFYRKQSIPKKITHPAKEAIA
NKNKDNPKKESVFEYDLIKDKRFTEDKFFFHCPITINFKSSGANKFNDEI
NLLLKEKANDVHILSIDRGERHLAYYTLVDGKGNIIKQDTFNIIGNDRMK
TNYHDKLAAIEKDRDSARKDWKKINNIKEMKEGYLSQVVHEIAKLVIEYN
AIVVFEDLNFGFKRGRFKVEKQVYQKLEKMLIEKLNYLVFKDNEFDKTGG
VLRAYQLTAPFETFKKMGKQTGIIYYVPAGFTSKICPVTGFVNQLYPKYE
SVSKSQEFFSKFDKICYNLDKGYFEFSFDYKNFGDKAAKGKWTIASFGSR
LINFRNSDKNHNWDTREVYPTKELEKLLKDYSIEYGHGECIKAAICGESD
KKFFAKLTSVLNTILQMRNSKTGTELDYLISPVADVNGNFFDSRQAPKNM
PQDAAANGAYHIGLKGLMLLGRIKNNQEGKKLNLVIKNEEYFEFVQNRNN

Francisella novicida Cpf1 D917A/E1006A (SEQ ID NO: 344) (A917, A1006, and D1255 are Bolded and Underlined)

MSIYQEFVNKYSLSKTLRFELIPQGKTLENIKARGLILDDEKRAKDYKKA
KQIIDKYHQFFIEEILSSVCISEDLLQNYSDVYFKLKKSDDDNLQKDFKS
AKDTIKKQISEYIKDSEKFKNLFNQNLIDAKKGQESDLILWLKQSKDNGI
ELFKANSDITDIDEALEIIKSFKGWTTYFKGFHENRKNVYSSNDIPTSII
YRIVDDNLPKFLENKAKYESLKDKAPEAINYEQIKKDLAEELTFDIDYKT
SEVNQRVFSLDEVFEIANFNNYLNQSGITKFNTIIGGKFVNGENTKRKGI
NEYINLYSQQINDKTLKKYKMSVLFKQILSDTESKSFVIDKLEDDSDVVT
TMQSFYEQIAAFKTVEEKSIKETLSLLFDDLKAQKLDLSKIYFKNDKSLT
DLSQQVFDDYSVIGTAVLEYITQQIAPKNLDNPSKKEQELIAKKTEKAKY
LSLETIKLALEEFNKHRDIDKQCRFEEILANFAAIPMIFDEIAQNKDNLA
QISIKYQNQGKKDLLQASAEDDVKAIKDLLDQTNNLLHKLKIFHISQSED
KANILDKDEHFYLVFEECYFELANIVPLYNKIRNYITQKPYSDEKFKLNF
ENSTLANGWDKNKEPDNTAILFIKDDKYYLGVMNKKNNKIFDDKAIKENK
GEGYKKIVYKLLPGANKMLPKVFFSAKSIKFYNPSEDILRIRNHSTHTKN
GSPQKGYEKFEFNIEDCRKFIDFYKQSISKHPEWKDFGFRFSDTQRYNSI
DEFYREVENQGYKLTFENISESYIDSVVNQGKLYLFQIYNKDFSAYSKGR
PNLHTLYWKALFDERNLQDVVYKLNGEAELFYRKQSIPKKITHPAKEAIA
NKNKDNPKKESVFEYDLIKDKRFTEDKFFFHCPITINFKSSGANKFNDEI
NLLLKEKANDVHILSIARGERHLAYYTLVDGKGNIIKQDTFNIIGNDRMK
TNYHDKLAAIEKDRDSARKDWKKINNIKEMKEGYLSQVVHEIAKLVIEYN
AIVVFADLNFGFKRGRFKVEKQVYQKLEKMLIEKLNYLVFKDNEFDKTGG
VLRAYQLTAPFETFKKMGKQTGIIYYVPAGFTSKICPVTGFVNQLYPKYE
SVSKSQEFFSKFDKICYNLDKGYFEFSFDYKNFGDKAAKGKWTIASFGSR
LINFRNSDKNHNWDTREVYPTKELEKLLKDYSIEYGHGECIKAAICGESD
KKFFAKLTSVLNTILQMRNSKTGTELDYLISPVADVNGNFFDSRQAPKNM
PQDADANGAYHIGLKGLMLLGRIKNNQEGKKLNLVIKNEEYFEFVQNRNN

Francisella novicida Cpf1 D917A/D1255A (SEQ ID NO: 345) (A917, E1006, and A1255 are Bolded and Underlined)

MSIYQEFVNKYSLSKTLRFELIPQGKTLENIKARGLILDDEKRAKDYKKA
KQIIDKYHQFFIEEILSSVCISEDLLQNYSDVYFKLKKSDDDNLQKDFKS
AKDTIKKQISEYIKDSEKFKNLFNQNLIDAKKGQESDLILWLKQSKDNGI
ELFKANSDITDIDEALEIIKSFKGWTTYFKGFHENRKNVYSSNDIPTSII
YRIVDDNLPKFLENKAKYESLKDKAPEAINYEQIKKDLAEELTFDIDYKT
SEVNQRVFSLDEVFEIANFNNYLNQSGITKFNTIIGGKFVNGENTKRKGI
NEYINLYSQQINDKTLKKYKMSVLFKQILSDTESKSFVIDKLEDDSDVVT
TMQSFYEQIAAFKTVEEKSIKETLSLLFDDLKAQKLDLSKIYFKNDKSLT
DLSQQVFDDYSVIGTAVLEYITQQIAPKNLDNPSKKEQELIAKKTEKAKY
LSLETIKLALEEFNKHRDIDKQCRFEEILANFAAIPMIFDEIAQNKDNLA
QISIKYQNQGKKDLLQASAEDDVKAIKDLLDQTNNLLHKLKIFHISQSED
KANILDKDEHFYLVFEECYFELANIVPLYNKIRNYITQKPYSDEKFKLNF
ENSTLANGWDKNKEPDNTAILFIKDDKYYLGVMNKKNNKIFDDKAIKENK
GEGYKKIVYKLLPGANKMLPKVFFSAKSIKFYNPSEDILRIRNHSTHTKN
GSPQKGYEKFEFNIEDCRKFIDFYKQSISKHPEWKDFGFRFSDTQRYNSI
DEFYREVENQGYKLTFENISESYIDSVVNQGKLYLFQIYNKDFSAYSKGR
PNLHTLYWKALFDERNLQDVVYKLNGEAELFYRKQSIPKKITHPAKEAIA
NKNKDNPKKESVFEYDLIKDKRFTEDKFFFHCPITINFKSSGANKFNDEI
NLLLKEKANDVHILSIARGERHLAYYTLVDGKGNIIKQDTFNIIGNDRMK
TNYHDKLAAIEKDRDSARKDWKKINNIKEMKEGYLSQVVHEIAKLVIEYN
AIVVFEDLNFGFKRGRFKVEKQVYQKLEKMLIEKLNYLVFKDNEFDKTGG
VLRAYQLTAPFETFKKMGKQTGIIYYVPAGFTSKICPVTGFVNQLYPKYE
SVSKSQEFFSKFDKICYNLDKGYFEFSFDYKNFGDKAAKGKWTIASFGSR
LINFRNSDKNHNWDTREVYPTKELEKLLKDYSIEYGHGECIKAAICGESD
KKFFAKLTSVLNTILQMRNSKTGTELDYLISPVADVNGNFFDSRQAPKNM
PQDAAANGAYHIGLKGLMLLGRIKNNQEGKKLNLVIKNEEYFEFVQNRNN

Francisella novicida Cpf1 E1006A/D1255A (SEQ ID NO: 346) (D917, A1006, and A1255 are Bolded and Underlined)

MSIYQEFVNKYSLSKTLRFELIPQGKTLENIKARGLILDDEKRAKDYKKA
KQIIDKYHQFFIEEILSSVCISEDLLQNYSDVYFKLKKSDDDNLQKDFKS
AKDTIKKQISEYIKDSEKFKNLFNQNLIDAKKGQESDLILWLKQSKDNGI
ELFKANSDITDIDEALEIIKSFKGWTTYFKGFHENRKNVYSSNDIPTSII
YRIVDDNLPKFLENKAKYESLKDKAPEAINYEQIKKDLAEELTFDIDYKT
SEVNQRVFSLDEVFEIANFNNYLNQSGITKFNTIIGGKFVNGENTKRKGI
NEYINLYSQQINDKTLKKYKMSVLFKQILSDTESKSFVIDKLEDDSDVVT
TMQSFYEQIAAFKTVEEKSIKETLSLLFDDLKAQKLDLSKIYFKNDKSLT
DLSQQVFDDYSVIGTAVLEYITQQIAPKNLDNPSKKEQELIAKKTEKAKY
LSLETIKLALEEFNKHRDIDKQCRFEEILANFAAIPMIFDEIAQNKDNLA
QISIKYQNQGKKDLLQASAEDDVKAIKDLLDQTNNLLHKLKIFHISQSED
KANILDKDEHFYLVFEECYFELANIVPLYNKIRNYITQKPYSDEKFKLNF
ENSTLANGWDKNKEPDNTAILFIKDDKYYLGVMNKKNNKIFDDKAIKENK
GEGYKKIVYKLLPGANKMLPKVFFSAKSIKFYNPSEDILRIRNHSTHTKN
GSPQKGYEKFEFNIEDCRKFIDFYKQSISKHPEWKDFGFRFSDTQRYNSI
DEFYREVENQGYKLTFENISESYIDSVVNQGKLYLFQIYNKDFSAYSKGR
PNLHTLYWKALFDERNLQDVVYKLNGEAELFYRKQSIPKKITHPAKEAIA
NKNKDNPKKESVFEYDLIKDKRFTEDKFFFHCPITINFKSSGANKFNDEI
NLLLKEKANDVHILSIDRGERHLAYYTLVDGKGNIIKQDTFNIIGNDRMK
TNYHDKLAAIEKDRDSARKDWKKINNIKEMKEGYLSQVVHEIAKLVIEYN
AIVVFADLNFGFKRGRFKVEKQVYQKLEKMLIEKLNYLVFKDNEFDKTGG
VLRAYQLTAPFETFKKMGKQTGIIYYVPAGFTSKICPVTGFVNQLYPKYE
SVSKSQEFFSKFDKICYNLDKGYFEFSFDYKNFGDKAAKGKWTIASFGSR
LINFRNSDKNHNWDTREVYPTKELEKLLKDYSIEYGHGECIKAAICGESD
KKFFAKLTSVLNTILQMRNSKTGTELDYLISPVADVNGNFFDSRQAPKNM
PQDAAANGAYHIGLKGLMLLGRIKNNQEGKKLNLVIKNEEYFEFVQNRNN

Francisella novicida Cpf1 D917A/E1006A/D1255A (SEQ ID NO: 347) (A917, A1006, and A1255 are Bolded and Underlined)

MSIYQEFVNKYSLSKTLRFELIPQGKTLENIKARGLILDDEKRAKDYKKA
KQIIDKYHQFFIEEILSSVCISEDLLQNYSDVYFKLKKSDDDNLQKDFKS
AKDTIKKQISEYIKDSEKFKNLFNQNLIDAKKGQESDLILWLKQSKDNGI
ELFKANSDITDIDEALEIIKSFKGWTTYFKGFHENRKNVYSSNDIPTSII
YRIVDDNLPKFLENKAKYESLKDKAPEAINYEQIKKDLAEELTFDIDYKT
SEVNQRVFSLDEVFEIANFNNYLNQSGITKFNTIIGGKFVNGENTKRKGI
NEYINLYSQQINDKTLKKYKMSVLFKQILSDTESKSFVIDKLEDDSDVVT
TMQSFYEQIAAFKTVEEKSIKETLSLLFDDLKAQKLDLSKIYFKNDKSLT
DLSQQVFDDYSVIGTAVLEYITQQIAPKNLDNPSKKEQELIAKKTEKAKY
LSLETIKLALEEFNKHRDIDKQCRFEEILANFAAIPMIFDEIAQNKDNLA
QISIKYQNQGKKDLLQASAEDDVKAIKDLLDQTNNLLHKLKIFHISQSED
KANILDKDEHFYLVFEECYFELANIVPLYNKIRNYITQKPYSDEKFKLNF
ENSTLANGWDKNKEPDNTAILFIKDDKYYLGVMNKKNNKIFDDKAIKENK
GEGYKKIVYKLLPGANKMLPKVFFSAKSIKFYNPSEDILRIRNHSTHTKN
GSPQKGYEKFEFNIEDCRKFIDFYKQSISKHPEWKDFGFRFSDTQRYNSI
DEFYREVENQGYKLTFENISESYIDSVVNQGKLYLFQIYNKDFSAYSKGR
PNLHTLYWKALFDERNLQDVVYKLNGEAELFYRKQSIPKKITHPAKEAIA
NKNKDNPKKESVFEYDLIKDKRFTEDKFFFHCPITINFKSSGANKFNDEI
NLLLKEKANDVHILSIARGERHLAYYTLVDGKGNIIKQDTFNIIGNDRMK
TNYHDKLAAIEKDRDSARKDWKKINNIKEMKEGYLSQVVHEIAKLVIEYN
AIVVFADLNFGFKRGRFKVEKQVYQKLEKMLIEKLNYLVFKDNEFDKTGG
VLRAYQLTAPFETFKKMGKQTGIIYYVPAGFTSKICPVTGFVNQLYPKYE
SVSKSQEFFSKFDKICYNLDKGYFEFSFDYKNFGDKAAKGKWTIASFGSR
LINFRNSDKNHNWDTREVYPTKELEKLLKDYSIEYGHGECIKAAICGESD
KKFFAKLTSVLNTILQMRNSKTGTELDYLISPVADVNGNFFDSRQAPKNM
PQDAAANGAYHIGLKGLMLLGRIKNNQEGKKLNLVIKNEEYFEFVQNRNN

[0144] In some embodiments, the guide nucleotide sequence-programmable DNA binding protein is a Cpf1 protein from a Acidaminococcus species (AsCpf1). Cpf1 proteins form Acidaminococcus species have been described previously and would be apparent to the skilled artisan. Exemplary Acidaminococcus Cpf1 proteins (AsCpf1) include, without limitation, any of the AsCpf1 proteins provided herin.

### Wild-Type AsCpf1-Residue R912 is Indicated in Bold Underlining and Residues 661-667 are Indicated in Italics and Underlining.

(SEQ ID NO: 684)
TQFEGFTNLYQVSKTLRFELIPQGKTLKHIQEQGFIEEDKARNDHYKELK
PIIDRIYKTYADQCLQLVQLDWENLSAAIDSYRKEKTEETRNALIEEQAT
YRNAIHDYFIGRTDNLTDAINKRHAEIYKGLFKAELFNGKVLKQLGTVTT
TEHENALLRSFDKFTTYFSGFYENRKNVFSAEDISTAIPHRIVQDNFPKF
KENCHIFTRLITAVPSLREHFENVKKAIGIFVSTSIEEVFSFPFYNQLLT
QTQIDLYNQLLGGISREAGTEKIKGLNEVLNLAIQKNDETAHIIASLPHR
FIPLFKQILSDRNTLSFILEEFKSDEEVIQSFCKYKTLLRNENVLETAEA
LFNELNSIDLTHIFISHKKLETISSALCDHWDTLRNALYERRISELTGKI
TKSAKEKVQRSLKHEDINLQEIISAAGKELSEAFKQKTSEILSHAHAALD
QPLPTTMLKKQEEKEILKSQLDSLLGLYHLLDWFAVDESNEVDPEFSARL
TGIKLEMEPSLSFYNKARNYATKKPYSVEKFKLNFQMPTLASGWDVNKEK
NNGAILFVKNGLYYLGIMPKQKGRYKALSFEPTEKTSEGFDKMYYDYFPD
AAKMIPKCSTQLKAVTAHFQTHTTPILLSNNFIEPLEITKEIYDLNNPEK
EPKKFQTAYAKKTGDQKGYREALCKWIDFTRDFLSKYTKTTSIDLSSLRP
SSQYKDLGEYYAELNPLLYHISFQRIAEKEIMDAVETGKLYLFQIYNKDF
AKGHHGKPNLHTLYWTGLFSPENLAKTSIKLNGQAELFYRPKSRMKRMAH
RLGEKMLNKKLKDQKTPIPDTLYQELYDYVNHRLSHDLSDEARALLPNVI
TKEVSHEIIKDRRFTSDKFFFHVPITLNYQAANSPSKFNQRVNAYLKEHP
ETPIIGIDRGERNLIYITVIDSTGKILEQRSLNTIQQFDYQKKLDNREKE
RVAARQAWSVVGTIKDLKQGYLSQVIHEIVDLMIHYQAVVVLENLNFGFK
SKRTGIAEKAVYQQFEKMLIDKLNCLVLKDYPAEKVGGVLNPYQLTDQFT
SFAKMGTQSGFLFYVPAPYTSKIDPLTGFVDPFVWKTIKNHESRKHFLEG
FDFLHYDVKTGDFILHFKMNRNLSFQRGLPGFMPAWDIVFEKNETQFDAK
GTPFIAGKRIVPVIENHRFTGRYRDLYPANELIALLEEKGIVFRDGSNIL
PKLLENDDSHAIDTMVALIRSVLQMRNSNAATGEDYINSPVRDLNGVCFD
SRFQNPEWPMDADANGAYHIALKGQLLLNHLKESKDLKLQNGISNQDWLA
YIQELRN

### AsCpf1(R912A)—Residue A912 is Indicated in Bold Underlining and Residues 661-667 are Indicated in Italics and Underlining.

(SEQ ID NO: 686)
TQFEGFTNLYQVSKTLRFELIPQGKTLKHIQEQGFIEEDKARNDHYKELK
PIIDRIYKTYADQCLQLVQLDWENLSAAIDSYRKEKTEETRNALIEEQAT
YRNAIHDYFIGRTDNLTDAINKRHAEIYKGLFKAELFNGKVLKQLGTVTT
TEHENALLRSFDKFTTYFSGFYENRKNVFSAEDISTAIPHRIVQDNFPKF
KENCHIFTRLITAVPSLREHFENVKKAIGIFVSTSIEEVFSFPFYNQLLT
QTQIDLYNQLLGGISREAGTEKIKGLNEVLNLAIQKNDETAHIIASLPHR
FIPLFKQILSDRNTLSFILEEFKSDEEVIQSFCKYKTLLRNENVLETAEA
LFNELNSIDLTHIFISHKKLETISSALCDHWDTLRNALYERRISELTGKI
TKSAKEKVQRSLKHEDINLQEIISAAGKELSEAFKQKTSEILSHAHAALD
QPLPTTMLKKQEEKEILKSQLDSLLGLYHLLDWFAVDESNEVDPEFSARL
TGIKLEMEPSLSFYNKARNYATKKPYSVEKFKLNFQMPTLASGWDVNKEK
NNGAILFVKNGLYYLGIMPKQKGRYKALSFEPTEKTSEGFDKMYYDYFPD
AAKMIPKCSTQLKAVTAHFQTHTTPILLSNNFIEPLEITKEIYDLNNPEK
EPKKFQTAYAKKTGDQKGYREALCKWIDFTRDFLSKYTKTTSIDLSSLRP
SSQYKDLGEYYAELNPLLYHISFQRIAEKEIMDAVETGKLYLFQIYNKDF
AKGHHGKPNLHTLYWTGLFSPENLAKTSIKLNGQAELFYRPKSRMKRMAH
RLGEKMLNKKLKDQKTPIPDTLYQELYDYVNHRLSHDLSDEARALLPNVI
TKEVSHEIIKDRRFTSDKFFFHVPITLNYQAANSPSKFNQRVNAYLKEHP
ETPIIGIDRGEANLIYITVIDSTGKILEQRSLNTIQQFDYQKKLDNREKE
RVAARQAWSVVGTIKDLKQGYLSQVIHEIVDLMIHYQAVVVLENLNFGFK
SKRTGIAEKAVYQQFEKMLIDKLNCLVLKDYPAEKVGGVLNPYQLTDQFT
SFAKMGTQSGFLFYVPAPYTSKIDPLTGFVDPFVWKTIKNHESRKHFLEG
FDFLHYDVKTGDFILHFKMNRNLSFQRGLPGFMPAWDIVFEKNETQFDAK
GTPFIAGKRIVPVIENHRFTGRYRDLYPANELIALLEEKGIVFRDGSNIL
PKLLENDDSHAIDTMVALIRSVLQMRNSNAATGEDYINSPVRDLNGVCFD
SRFQNPEWPMDADANGAYHIALKGQLLLNHLKESKDLKLQNGISNQDWLA
YIQELRN

[0147] In some embodiments, the guide nucleotide sequence-programmable DNA binding protein is a Cpf1 protein from a Lachnospiraceae species (LbCpf1). Cpf1 proteins form Lachnospiraceae species have been described previously have been described previously and would be apparent to the skilled artisan. Exemplary Lachnospiraceae Cpf1 proteins (LbCpf1) include, without limitation, any of the LbCpf1 proteins provided herein.

### Wild-Type LbCpf1—Residues R836 and R1138 is Indicated in Bold Underlining.

(SEQ ID NO: 685)
MSKLEKFTNCYSLSKTLRFKAIPVGKTQENIDNKRLLVEDEKRAEDYKGV
KKLLDRYYLSFINDVLHSIKLKNLNNYISLFRKKTRTEKENKELENLEIN
LRKEIAKAFKGNEGYKSLFKKDIIETILPEFLDDKDEIALVNSFNGFTTA
FTGFFDNRENMFSEEAKSTSIAFRCINENLTRYISNMDIFEKVDAIFDKH
EVQEIKEKILNSDYDVEDFFEGEFFNFVLTQEGIDVYNAIIGGFVTESGE
KIKGLNEYINLYNQKTKQKLPKFKPLYKQVLSDRESLSFYGEGYTSDEEV
LEVFRNTLNKNSEIFSSIKKLEKLFKNFDEYSSAGIFVKNGPAISTISKD
IFGEWNVIRDKWNAEYDDIHLKKKAVVTEKYEDDRRKSFKKIGSFSLEQL
QEYADADLSVVEKLKEIIIQKVDEIYKVYGSSEKLFDADFVLEKSLKKND
AVVAIMKDLLDSVKSFENYIKAFFGEGKETNRDESFYGDFVLAYDILLKV
DHIYDAIRNYVTQKPYSKDKFKLYFQNPQFMGGWDKDKETDYRATILRYG
SKYYLAIMDKKYAKCLQKIDKDDVNGNYEKINYKLLPGPNKMLPKVFFSK
KWMAYYNPSEDIQKIYKNGTFKKGDMFNLNDCHKLIDFFKDSISRYPKWS
NAYDFNFSETEKYKDIAGFYREVEEQGYKVSFESASKKEVDKLVEEGKLY
MFQIYNKDFSDKSHGTPNLHTMYFKLLFDENNHGQIRLSGGAELFMRRAS
LKKEELVVHPANSPIANKNPDNPKKTTTLSYDVYKDKRFSEDQYELHIPI
AINKCPKNIFKINTEVRVLLKHDDNPYVIGIDRGERNLLYIVVVDGKGNI
VEQYSLNEIINNFNGIRIKTDYHSLLDKKEKERFEARQNWTSIENIKELK
AGYISQVVHKICELVEKYDAVIALEDLNSGFKNSRVKVEKQVYQKFEKML
IDKLNYMVDKKSNPCATGGALKGYQITNKFESFKSMSTQNGFIFYIPAWL
TSKIDPSTGFVNLLKTKYTSIADSKKFISSFDRIMYVPEEDLFEFALDYK
NFSRTDADYIKKWKLYSYGNRIRIFRNPKKNNVFDWEEVCLTSAYKELFN
KYGINYQQGDIRALLCEQSDKAFYSSFMALMSLMLQMRNSITGRTDVDFL
ISPVKNSDGIFYDSRNYEAQENAILPKNADANGAYNIARKVLWAIGQFKK
AEDEKLDKVKIAISNKEWLEYAQTSVKH

### LbCpf1 (R836A)—Residue A836 is Indicated in Bold Underlining.

(SEQ ID NO: 687)
MSKLEKFTNCYSLSKTLRFKAIPVGKTQENIDNKRLLVEDEKRAEDYKGV
KKLLDRYYLSFINDVLHSIKLKNLNNYISLFRKKTRTEKENKELENLEIN
LRKEIAKAFKGNEGYKSLFKKDIIETILPEFLDDKDEIALVNSFNGFTTA
FTGFFDNRENMFSEEAKSTSIAFRCINENLTRYISNMDIFEKVDAIFDKH
EVQEIKEKILNSDYDVEDFFEGEFFNFVLTQEGIDVYNAIIGGFVTESGE
KIKGLNEYINLYNQKTKQKLPKFKPLYKQVLSDRESLSFYGEGYTSDEEV
LEVFRNTLNKNSEIFSSIKKLEKLFKNFDEYSSAGIFVKNGPAISTISKD
IFGEWNVIRDKWNAEYDDIHLKKKAVVTEKYEDDRRKSFKKIGSFSLEQL
QEYADADLSVVEKLKEIIIQKVDEIYKVYGSSEKLFDADFVLEKSLKKND
AVVAIMKDLLDSVKSFENYIKAFFGEGKETNRDESFYGDFVLAYDILLKV
DHIYDAIRNYVTQKPYSKDKFKLYFQNPQFMGGWDKDKETDYRATILRYG
SKYYLAIMDKKYAKCLQKIDKDDVNGNYEKINYKLLPGPNKMLPKVFFSK
KWMAYYNPSEDIQKIYKNGTFKKGDMFNLNDCHKLIDFFKDSISRYPKWS
NAYDFNFSETEKYKDIAGFYREVEEQGYKVSFESASKKEVDKLVEEGKLY
MFQIYNKDFSDKSHGTPNLHTMYFKLLFDENNHGQIRLSGGAELFMRRAS
LKKEELVVHPANSPIANKNPDNPKKTTTLSYDVYKDKRFSEDQYELHIPI
AINKCPKNIFKINTEVRVLLKHDDNPYVIGIDRGEANLLYIVVVDGKGNI
VEQYSLNEIINNFNGIRIKTDYHSLLDKKEKERFEARQNWTSIENIKELK
AGYISQVVHKICELVEKYDAVIALEDLNSGFKNSRVKVEKQVYQKFEKML
IDKLNYMVDKKSNPCATGGALKGYQITNKFESFKSMSTQNGFIFYIPAWL
TSKIDPSTGFVNLLKTKYTSIADSKKFISSFDRIMYVPEEDLFEFALDYK
NFSRTDADYIKKWKLYSYGNRIRIFRNPKKNNVFDWEEVCLTSAYKELFN
KYGINYQQGDIRALLCEQSDKAFYSSFMALMSLMLQMRNSITGRTDVDFL
ISPVKNSDGIFYDSRNYEAQENAILPKNADANGAYNIARKVLWAIGQFKK
AEDEKLDKVKIAISNKEWLEYAQTSVKH

### LbCpf1 (R1138A)—Residue A1138 is Indicated in Bold Underlining.

(SEQ ID NO: 688)
MSKLEKFTNCYSLSKTLRFKAIPVGKTQENIDNKRLLVEDEKRAEDYKGV
KKLLDRYYLSFINDVLHSIKLKNLNNYISLFRKKTRTEKENKELENLEIN
LRKEIAKAFKGNEGYKSLFKKDIIETILPEFLDDKDEIALVNSFNGFTTA
FTGFFDNRENMFSEEAKSTSIAFRCINENLTRYISNMDIFEKVDAIFDKH
EVQEIKEKILNSDYDVEDFFEGEFFNFVLTQEGIDVYNAIIGGFVTESGE
KIKGLNEYINLYNQKTKQKLPKFKPLYKQVLSDRESLSFYGEGYTSDEEV
LEVFRNTLNKNSEIFSSIKKLEKLFKNFDEYSSAGIFVKNGPAISTISKD
IFGEWNVIRDKWNAEYDDIHLKKKAVVTEKYEDDRRKSFKKIGSFSLEQL
QEYADADLSVVEKLKEIIIQKVDEIYKVYGSSEKLFDADFVLEKSLKKND
AVVAIMKDLLDSVKSFENYIKAFFGEGKETNRDESFYGDFVLAYDILLKV
DHIYDAIRNYVTQKPYSKDKFKLYFQNPQFMGGWDKDKETDYRATILRYG
SKYYLAIMDKKYAKCLQKIDKDDVNGNYEKINYKLLPGPNKMLPKVFFSK
KWMAYYNPSEDIQKIYKNGTFKKGDMFNLNDCHKLIDFFKDSISRYPKWS
NAYDFNFSETEKYKDIAGFYREVEEQGYKVSFESASKKEVDKLVEEGKLY
MFQIYNKDFSDKSHGTPNLHTMYFKLLFDENNHGQIRLSGGAELFMRRAS
LKKEELVVHPANSPIANKNPDNPKKTTTLSYDVYKDKRFSEDQYELHIPI
AINKCPKNIFKINTEVRVLLKHDDNPYVIGIDRGERNLLYIVVVDGKGNI
VEQYSLNEIINNFNGIRIKTDYHSLLDKKEKERFEARQNWTSIENIKELK
AGYISQVVHKICELVEKYDAVIALEDLNSGFKNSRVKVEKQVYQKFEKML
IDKLNYMVDKKSNPCATGGALKGYQITNKFESFKSMSTQNGFIFYIPAWL
TSKIDPSTGFVNLLKTKYTSIADSKKFISSFDRIMYVPEEDLFEFALDYK
NFSRTDADYIKKWKLYSYGNRIRIFRNPKKNNVFDWEEVCLTSAYKELFN
KYGINYQQGDIRALLCEQSDKAFYSSFMALMSLMLQMANSITGRTDVDFL
ISPVKNSDGIFYDSRNYEAQENAILPKNADANGAYNIARKVLWAIGQFKK
AEDEKLDKVKIAISNKEWLEYAQTSVKH

[0151] In some embodiments, the Cpf1 protein is a crippled Cpf1 protein. As used herein a “crippled Cpf1” protein is a Cpf1 protein having diminished nuclease activity as compared to a wild-type Cpf1 protein. In some embodiments, the crippled Cpf1 protein preferentially cuts the target strand more efficiently than the non-target strand. For example, the Cpf1 protein preferentially cuts the strand of a duplexed nucleic acid molecule in which a nucleotide to be edited resides. In some embodiments, the crippled Cpf1 protein preferentially cuts the non-target strand more efficiently than the target strand. For example, the Cpf1 protein preferentially cuts the strand of a duplexed nucleic acid molecule in which a nucleotide to be edited does not reside. In some embodiments, the crippled Cpf1 protein preferentially cuts the target strand at least 5% more efficiently than it cuts the non-target strand. In some embodiments, the crippled Cpf1 protein preferentially cuts the target strand at least 5%, at least 10%, at least 15%, at least 20%, at least 25%, at least 30%, at least 35%, at least 40%, at least 50%, at least 60%, at least 70%, at least 80%, at least 90%, or at least 100% more efficiently than it cuts the non-target strand.

[0152] In some embodiments, a crippled Cpf1 protein is a non-naturally occurring Cpf1 protein. In some embodiments, the crippled Cpf1 protein comprises one or more mutations relative to a wild-type Cpf1 protein. In some embodiments, the crippled Cpf1 protein comprises 1, 2, 3, 4, 5, 6, 7, 8, 9, 10, 11, 12, 13, 14, 15, 16, 17, 18, 19, or 20 mutations relative to a wild-type Cpf1 protein. In some embodiments, the crippled Cpf1 protein comprises an R836A mutation mutation as set forth in SEQ ID NO: 685, or in a corresponding amino acid in another Cpf1 protein. It should be appreciated that a Cpf1 comprising a homologous residue (e.g., a corresponding amino acid) to R836A of SEQ ID NO: 685 could also be mutated to achieve similar results. In some embodiments, the crippled Cpf1 protein comprises a R1138A mutation as set forth in SEQ ID NO: 685, or in a corresponding amino acid in another Cpf1 protein. In some embodiments, the crippled Cpf1 protein comprises an R912A mutation mutation as set forth in SEQ ID NO: 684, or in a corresponding amino acid in another Cpf1 protein. Without wishing to be bound by any particular theory, residue R838 of SEQ ID NO: 685 (LbCpf1) and residue R912 of SEQ ID NO: 684 (AsCpf1) are examples of corresponding (e.g., homologous) residues. For example, a portion of the alignment between SEQ ID NO: 684 and 685 shows that R912 and R838 are corresponding residues.

| | |
|---|---|
| AsCpf1 | YQAANSPSKFNQRVNAYLKEHPETPIIGIDRGERNLIYITVIDSTGKILEQRSLNTIQ-- |
| LbCpf1 | KCPKN-IFKINTEVRVLLKHDDNPYVIGIDRGERNLLYIVVVDGKGNIVEQYSLNEIINN |
| | * *:* .*.. **.. : :**********:**.*:*..*:*:** *** * |

[0153] In some embodiments, any of the Cpf1 proteins provided herein comprises one or more amino acid deletions. In some embodiments, any of the Cpf1 proteins provided herein comprises 1, 2, 3, 4, 5, 6, 7, 8, 9, 10, 11, 12, 13, 14, 15, 16, 17, 18, 19, or 20 amino acid deletions. Without wishing to be bound by any particular theory, there is a helical region in Cpf1, which includes residues 661-667 of AsCpf1 (SEQ ID NO: 684), that may obstruct the function of a deaminase (e.g., APOBEC) that is fused to the Cpf1. This region comprises the amino acid sequence KKTGDQK (SEQ ID NO: 737). Accordingly, aspects of the disclosure provide Cpf1 proteins comprising mutations (e.g., deletions) that disrupt this helical region in Cpf1. In some embodiments, the Cpf1 protein comprises one or more deletions of the following residues in SEQ ID NO: 684, or one or more corresponding deletions in another Cpf1 protein: K661, K662, T663, G664, D665, Q666, and K667, In some embodiments, the Cpf1 protein comprises a T663 and a D665 deletion in SEQ ID NO: 684, or corresponding deletions in another Cpf1 protein. In some embodiments, the Cpf1 protein comprises a K662, T663, D665, and Q666 deletion in SEQ ID NO: 684, or corresponding deletions in another Cpf1 protein. In some embodiments, the Cpf1 protein comprises a K661, K662, T663, D665, Q666 and K667 deletion in SEQ ID NO: 684, or corresponding deletions in another Cpf1 protein.

### AsCpf1 (Deleted T663 and D665)

(SEQ ID NO: 689)
TQFEGFTNLYQVSKTLRFELIPQGKTLKHIQEQGFIEEDKARNDHYKELK
PIIDRIYKTYADQCLQLVQLDWENLSAAIDSYRKEKTEETRNALIEEQAT
YRNAIHDYFIGRTDNLTDAINKRHAEIYKGLFKAELFNGKVLKQLGTVTT
TEHENALLRSFDKFTTYFSGFYENRKNVFSAEDISTAIPHRIVQDNFPKF
KENCHIFTRLITAVPSLREHFENVKKAIGIFVSTSIEEVFSFPFYNQLLT
QTQIDLYNQLLGGISREAGTEKIKGLNEVLNLAIQKNDETAHIIASLPHR
FIPLFKQILSDRNTLSFILEEFKSDEEVIQSFCKYKTLLRNENVLETAEA
LFNELNSIDLTHIFISHKKLETISSALCDHWDTLRNALYERRISELTGKI
TKSAKEKVQRSLKHEDINLQEIISAAGKELSEAFKQKTSEILSHAHAALD
QPLPTTMLKKQEEKEILKSQLDSLLGLYHLLDWFAVDESNEVDPEFSARL
TGIKLEMEPSLSFYNKARNYATKKPYSVEKFKLNFQMPTLASGWDVNKEK
NNGAILFVKNGLYYLGIMPKQKGRYKALSFEPTEKTSEGFDKMYYDYFPD
AAKMIPKCSTQLKAVTAHFQTHTTPILLSNNFIEPLEITKEIYDLNNPEK
EPKKFQTAYAKKGQKGYREALCKWIDFTRDFLSKYTKTTSIDLSSLRPSS
QYKDLGEYYAELNPLLYHISFQRIAEKEIMDAVETGKLYLFQIYNKDFAK
GHHGKPNLHTLYWTGLFSPENLAKTSIKLNGQAELFYRPKSRMKRMAHRL
GEKMLNKKLKDQKTPIPDTLYQELYDYVNHRLSHDLSDEARALLPNVITK
EVSHEIIKDRRFTSDKFFFHVPITLNYQAANSPSKFNQRVNAYLKEHPET
PIIGIDRGERNLIYITVIDSTGKILEQRSLNTIQQFDYQKKLDNREKERV
AARQAWSVVGTIKDLKQGYLSQVIHEIVDLMIHYQAVVVLENLNFGFKSK
RTGIAEKAVYQQFEKMLIDKLNCLVLKDYPAEKVGGVLNPYQLTDQFTSF
AKMGTQSGFLFYVPAPYTSKIDPLTGFVDPFVWKTIKNHESRKHFLEGFD
FLHYDVKTGDFILHFKMNRNLSFQRGLPGFMPAWDIVFEKNETQFDAKGT
PFIAGKRIVPVIENHRFTGRYRDLYPANELIALLEEKGIVFRDGSNILPK
LLENDDSHAIDTMVALIRSVLQMRNSNAATGEDYINSPVRDLNGVCFDSR
FQNPEWPMDADANGAYHIALKGQLLLNHLKESKDLKLQNGISNQDWLAYI
QELRN

### AsCpf1 (Deleted K662, T663, D665, and Q666)

(SEQ ID NO: 690)
TQFEGFTNLYQVSKTLRFELIPQGKTLKHIQEQGFIEEDKARNDHYKELK
PIIDRIYKTYADQCLQLVQLDWENLSAAIDSYRKEKTEETRNALIEEQAT
YRNAIHDYFIGRTDNLTDAINKRHAEIYKGLFKAELFNGKVLKQLGTVTT
TEHENALLRSFDKFTTYFSGFYENRKNVFSAEDISTAIPHRIVQDNFPKF
KENCHIFTRLITAVPSLREHFENVKKAIGIFVSTSIEEVFSFPFYNQLLT
QTQIDLYNQLLGGISREAGTEKIKGLNEVLNLAIQKNDETAHIIASLPHR
FIPLFKQILSDRNTLSFILEEFKSDEEVIQSFCKYKTLLRNENVLETAEA
LFNELNSIDLTHIFISHKKLETISSALCDHWDTLRNALYERRISELTGKI
TKSAKEKVQRSLKHEDINLQEIISAAGKELSEAFKQKTSEILSHAHAALD
QPLPTTMLKKQEEKEILKSQLDSLLGLYHLLDWFAVDESNEVDPEFSARL
TGIKLEMEPSLSFYNKARNYATKKPYSVEKFKLNFQMPTLASGWDVNKEK
NNGAILFVKNGLYYLGIMPKQKGRYKALSFEPTEKTSEGFDKMYYDYFPD
AAKMIPKCSTQLKAVTAHFQTHTTPILLSNNFIEPLEITKEIYDLNNPEK
EPKKFQTAYAKGKGYREALCKWIDFTRDFLSKYTKTTSIDLSSLRPSSQY
KDLGEYYAELNPLLYHISFQRIAEKEIMDAVETGKLYLFQIYNKDFAKGH
HGKPNLHTLYWTGLFSPENLAKTSIKLNGQAELFYRPKSRMKRMAHRLGE
KMLNKKLKDQKTPIPDTLYQELYDYVNHRLSHDLSDEARALLPNVITKEV
SHEIIKDRRFTSDKFFFHVPITLNYQAANSPSKFNQRVNAYLKEHPETPI
IGIDRGERNLIYITVIDSTGKILEQRSLNTIQQFDYQKKLDNREKERVAA
RQAWSVVGTIKDLKQGYLSQVIHEIVDLMIHYQAVVVLENLNFGFKSKRT
GIAEKAVYQQFEKMLIDKLNCLVLKDYPAEKVGGVLNPYQLTDQFTSFAK
MGTQSGFLFYVPAPYTSKIDPLTGFVDPFVWKTIKNHESRKHFLEGFDFL
HYDVKTGDFILHFKMNRNLSFQRGLPGFMPAWDIVFEKNETQFDAKGTPF
IAGKRIVPVIENHRFTGRYRDLYPANELIALLEEKGIVFRDGSNILPKLL
ENDDSHAIDTMVALIRSVLQMRNSNAATGEDYINSPVRDLNGVCFDSRFQ
NPEWPMDADANGAYHIALKGQLLLNHLKESKDLKLQNGISNQDWLAYIQE
LRN

### AsCpf1 (Deleted K661, K662, T663, D665, Q666, and K667)

(SEQ ID NO: 691)
TQFEGFTNLYQVSKTLRFELIPQGKTLKHIQEQGFIEEDKARNDHYKELK
PIIDRIYKTYADQCLQLVQLDWENLSAAIDSYRKEKTEETRNALIEEQAT
YRNAIHDYFIGRTDNLTDAINKRHAEIYKGLFKAELFNGKVLKQLGTVTT
TEHENALLRSFDKFTTYFSGFYENRKNVFSAEDISTAIPHRIVQDNFPKF
KENCHIFTRLITAVPSLREHFENVKKAIGIFVSTSIEEVFSFPFYNQLLT
QTQIDLYNQLLGGISREAGTEKIKGLNEVLNLAIQKNDETAHIIASLPHR
FIPLFKQILSDRNTLSFILEEFKSDEEVIQSFCKYKTLLRNENVLETAEA
LFNELNSIDLTHIFISHKKLETISSALCDHWDTLRNALYERRISELTGKI
TKSAKEKVQRSLKHEDINLQEIISAAGKELSEAFKQKTSEILSHAHAALD
QPLPTTMLKKQEEKEILKSQLDSLLGLYHLLDWFAVDESNEVDPEFSARL
TGIKLEMEPSLSFYNKARNYATKKPYSVEKFKLNFQMPTLASGWDVNKEK
NNGAILFVKNGLYYLGIMPKQKGRYKALSFEPTEKTSEGFDKMYYDYFPD
AAKMIPKCSTQLKAVTAHFQTHTTPILLSNNFIEPLEITKEIYDLNNPEK
EPKKFQTAYAGGYREALCKWIDFTRDFLSKYTKTTSIDLSSLRPSSQYKD
LGEYYAELNPLLYHISFQRIAEKEIMDAVETGKLYLFQIYNKDFAKGHHG
KPNLHTLYWTGLFSPENLAKTSIKLNGQAELFYRPKSRMKRMAHRLGEKM
LNKKLKDQKTPIPDTLYQELYDYVNHRLSHDLSDEARALLPNVITKEVSH
EIIKDRRFTSDKFFFHVPITLNYQAANSPSKFNQRVNAYLKEHPETPIIG
IDRGERNLIYITVIDSTGKILEQRSLNTIQQFDYQKKLDNREKERVAARQ
AWSVVGTIKDLKQGYLSQVIHEIVDLMIHYQAVVVLENLNFGFKSKRTGI
AEKAVYQQFEKMLIDKLNCLVLKDYPAEKVGGVLNPYQLTDQFTSFAKMG
TQSGFLFYVPAPYTSKIDPLTGFVDPFVWKTIKNHESRKHFLEGFDFLHY
DVKTGDFILHFKMNRNLSFQRGLPGFMPAWDIVFEKNETQFDAKGTPFIA
GKRIVPVIENHRFTGRYRDLYPANELIALLEEKGIVFRDGSNILPKLLEN
DDSHAIDTMVALIRSVLQMRNSNAATGEDYINSPVRDLNGVCFDSRFQNP
EWPMDADANGAYHIALKGQLLLNHLKESKDLKLQNGISNQDWLAYIQELR
N

[0157] In some embodiments, the guide nucleotide sequence-programmable DNA-binding protein domain of the present disclosure has no requirements for a PAM sequence. One example of such a guide nucleotide sequence-programmable DNA-binding protein may be an Argonaute protein from Natronobacterium gregoryi (NgAgo). NgAgo is a ssDNA-guided endonuclease. NgAgo binds 5′ phosphorylated ssDNA of ˜24 nucleotides (gDNA) to guide it to its target site and will make DNA double-strand breaks at the gDNA site. In contrast to Cas9, the NgAgo-gDNA system does not require a protospacer-adjacent motif (PAM). Using a nuclease inactive NgAgo (dNgAgo) can greatly expand the codons that may be targeted. The characterization and use of NgAgo have been described in Gao et al., Nat Biotechnol., 2016 July; 34(7):768-73. PubMed PMID: 27136078; Swarts et al., Nature. 507(7491) (2014):258-61; and Swarts et al., Nucleic Acids Res. 43(10) (2015):5120-9, each of which is incorporated herein by reference. The sequence of Natronobacterium gregoryi Argonaute is provided in SEQ ID NO: 348.

Wild Type Natronobacterium gregoryi Argonaute (SEQ ID NO: 348)

MTVIDLDSTTTADELTSGHTYDISVTLTGVYDNTDEQHPRMSLAFEQDNG
ERRYITLWKNTTPKDVFTYDYATGSTYIFTNIDYEVKDGYENLTATYQTT
VENATAQEVGTTDEDETFAGGEPLDHHLDDALNETPDDAETESDSGHVMT
SFASRDQLPEWTLHTYTLTATDGAKTDTEYARRTLAYTVRQELYTDHDAA
PVATDGLMLLTPEPLGETPLDLDCGVRVEADETRTLDYTTAKDRLLAREL
VEEGLKRSLWDDYLVRGIDEVLSKEPVLTCDEFDLHERYDLSVEVGHSGR
AYLHINFRHRFVPKLTLADIDDDNIYPGLRVKTTYRPRRGHIVWGLRDEC
ATDSLNTLGNQSVVAYHRNNQTPINTDLLDAIEAADRRVVETRRQGHGDD
AVSFPQELLAVEPNTHQIKQFASDGFHQQARSKTRLSASRCSEKAQAFAE
RLDPVRLNGSTVEFSSEFFTGNNEQQLRLLYENGESVLTFRDGARGAHPD
ETFSKGIVNPPESFEVAVVLPEQQADTCKAQWDTMADLLNQAGAPPTRSE
TVQYDAFSSPESISLNVAGAIDPSEVDAAFVVLPPDQEGFADLASPTETY
DELKKALANMGIYSQMAYFDRFRDAKIFYTRNVALGLLAAAGGVAFTTEH
AMPGDADMFIGIDVSRSYPEDGASGQINIAATATAVYKDGTILGHSSTRP
QLGEKLQSTDVRDIMKNAILGYQQVTGESPTHIVIHRDGFMNEDLDPATE
FLNEQGVEYDIVEIRKQPQTRLLAVSDVQYDTPVKSIAAINQNEPRATVA
TFGAPEYLATRDGGGLPRPIQIERVAGETDIETLTRQVYLLSQSHIQVHN
STARLPITTAYADQASTHATKGYLVQTGAFESNVGFL

[0158] In some embodiments, the guide nucleotide sequence-programmable DNA-binding protein is a prokaryotic homolog of an Argonaute protein. Prokaryotic homologs of Argonaute proteins are known and have been described, for example, in Makarova K., et al., “Prokaryotic homologs of Argonaute proteins are predicted to function as key components of a novel system of defense against mobile genetic elements”, Biol. Direct. 2009 Aug. 25; 4:29. doi: 10.1186/1745-6150-4-29, which is incorporated herein by reference. In some embodiments, the guide nucleotide sequence-programmable DNA-binding protein is a Marinitoga piezophila Argunaute (MpAgo) protein. The CRISPR-associated Marinitoga piezophila Argonaute (MpAgo) protein cleaves single-stranded target sequences using 5′-phosphorylated guides. The 5′ guides are used by all known Argonautes. The crystal structure of an MpAgo-RNA complex shows a guide strand binding site comprising residues that block 5′ phosphate interactions. This data suggests the evolution of an Argonaute subclass with noncanonical specificity for a 5′-hydroxylated guide. See, e.g., Kaya et al., “A bacterial Argonaute with noncanonical guide RNA specificity”, Proc Natl Acad Sci USA. 2016 Apr. 12; 113(15):4057-62, the entire contents of which are hereby incorporated by reference). It should be appreciated that other Argonaute proteins may be used in any of the fusion proteins (e.g., base editors) described herein, for example, to guide a deaminase (e.g., cytidine deaminase) to a target nucleic acid (e.g., ssRNA).

[0159] In some embodiments, the guide nucleotide sequence-programmable DNA-binding protein is a single effector of a microbial CRISPR-Cas system. Single effectors of microbial CRISPR-Cas systems include, without limitation, Cas9, Cpf1, C2c1, C2c2, and C2c3. Typically, microbial CRISPR-Cas systems are divided into Class 1 and Class 2 systems. Class 1 systems have multisubunit effector complexes, while Class 2 systems have a single protein effector, Cas9 and Cpf1 are Class 2 effectors. In addition to Cas9 and Cpf1, three distinct Class 2 CRISPR-Cas systems (C2c1, C2c2, and C2c3) have been described by Shmakov et al., “Discovery and Functional Characterization of Diverse Class 2 CRISPR Cas Systems”, Mol. Cell, 2015 Nov. 5; 60(3): 385-397, the entire contents of which are herein incorporated by reference. Effectors of two of the systems, C2c1 and C2c3, contain RuvC-like endonuclease domains related to Cpf1. A third system, C2c2 contains an effector with two predicted HEPN RNase domains. Production of mature CRISPR RNA is tracrRN A-independent, unlike production of CRISPR RNA by C2c1, C2c1 depends on both CRISPR RNA and tracrRNA for DNA cleavage. Bacterial C2c2 has been shown to possess a unique RNase activity for CRISPR RNA maturation distinct from its RNA-activated single-stranded RNA degradation activity. These RNase functions are different from each other and from the CRISPR RNA-processing behavior of Cpf1. See. e.g., East-Seletsky, et al., “Two distinct RNase activities of CRISPR-C2c2 enable guide-RNA processing and RNA detection”, Nature, 2016 Oct. 13; 538(7624):270-273, the entire contents of which are hereby incorporated by reference. In vitro biochemical analysis of C2c2 in Leptotrichia shahii has shown that C2c2 is guided by a single CRISPR RNA and can be programmed to cleave ssRNA targets carrying complementary protospacers. Catalytic residues in the two conserved HEPN domains mediate cleavage. Mutations in the catalytic residues generate catalytically inactive RNA-binding proteins. See e.g., Abudayyeh et al., “C2c2 is a single-component programmable RNA-guided RNA-targeting CRISPR effector.” Science, 2016 Aug. 5; 353(6299), the entire contents of which are hereby incorporated by reference.

[0160] The crystal structure of Alicyclobaccillus acidoterrastris C2c1 (AacC2c1) has been reported in complex with a chimeric single-molecule guide RNA (sgRNA). See, e.g., Liu et al., “C2c1-sgRNA Complex Structure Reveals RNA-Guided DNA Cleavage Mechanism”, Mol. Cell. 2017 Jan. 19; 65(2):310-322, incorporated herein by reference. The crystal structure has also been reported for Alicyclobacillus acidoterrestris C2c1 bound to target DNAs as ternary complexes. See. e.g., Yang et al., “PAM-dependent Target DNA Recognition and Cleavage by C2C1 CRISPR-Cas endonuclease”, Cell, 2016 Dec. 15; 167(7):1814-1828, the entire contents of which are hereby incorporated by reference. Catalytically competent conformations of AacC2c1, both with target and non-target DNA strands, have been captured independently positioned within a single RuvC catalytic pocket, with C2c1-mediated cleavage resulting in a staggered seven-nucleotide break of target DNA. Structural comparisons between C2c1 ternary complexes and previously identified Cas9 and Cpf1 counterparts demonstrate the diversity of mechanisms used by CRISPR-Cas9 systems.

[0161] In some embodiments, the guide nucleotide sequence-programmable DNA-binding protein of any of the fusion proteins provided herein is a C2c1, a C2c2, or a C2c3 protein. In some embodiments, the guide nucleotide sequence-programmable DNA-binding protein is a C2c1 protein. In some embodiments, the guide nucleotide sequence-programmable DNA-binding protein is a C2c2 protein. In some embodiments, the guide nucleotide sequence-programmable DNA-binding protein is a C2c3 protein. In some embodiments, the guide nucleotide sequence-programmable DNA-binding protein comprises an amino acid sequence that is at least 85%, at least 90%, at least 91%, at least 92%, at least 93%, at least 94%, at least 95%, at least 96%, at least 97%, at least 98%, at least 99%, or at least 99.5% identical to a naturally-occurring C2c1, C2c2, or C2c3 protein. In some embodiments, the guide nucleotide sequence-programmable DNA-binding protein is a naturally-occurring C2c1, C2c2, or C2c3 protein. In some embodiments, the guide nucleotide sequence-programmable DNA-binding protein comprises an amino acid sequence that is at least 85%, at least 90%, at least 91%, at least 92%, at least 93%, at least 94%, at least 95%, at least 96%, at least 97%, at least 98%, at least 99%, or at least 99.5% identical to any one of SEQ ID NOs: 692-694. In some embodiments, the guide nucleotide sequence-programmable DNA-binding protein comprises an amino acid sequence of any one SEQ ID NOs: 692-694. It should be appreciated that C2c1, C2c2, or C2c3 from other bacterial species may also be used in accordance with the present disclosure.

### C2c1 (Uniprot.Org/Uniprot/T0D7A2 #)

sp|T0D7A2|C2C1_ALIAG CRISPR-associated
endonuclease C2c1 OS = Alicyclobacillus
acidoterrestris (strain ATCC 49025/
DSM 3922/CIP 106132/NCIMB 13137/GD3B)
GN = c2c1 PE = 1 SV = 1
(SEQ ID NO: 692)
MAVKSIKVKLRLDDMPEIRAGLWKLHKEVNAGVRYYTEWLSLLRQENLYR
RSPNGDGEQECDKTAEECKAELLERLRARQVENGHRGPAGSDDELLQLAR
QLYELLVPQAIGAKGDAQQIARKFLSPLADKDAVGGLGIAKAGNKPRWVR
MREAGEPGWEEEKEKAETRKSADRTADVLRALADFGLKPLMRVYTDSEMS
SVEWKPLRKGQAVRTWDRDMFQQAIERMMSWESWNQRVGQEYAKLVEQKN
RFEQKNFVGQEHLVHLVNQLQQDMKEASPGLESKEQTAHYVTGRALRGSD
KVFEKWGKLAPDAPFDLYDAEIKNVQRRNTRRFGSHDLFAKLAEPEYQAL
WREDASFLTRYAVYNSILRKLNHAKMFATFTLPDATAHPIWTRFDKLGGN
LHQYTFLFNEFGERRHAIRFHKLLKVENGVAREVDDVTVPISMSEQLDNL
LPRDPNEPIALYFRDYGAEQHFTGEFGGAKIQCRRDQLAHMHRRRGARDV
YLNVSVRVQSQSEARGERRPPYAAVFRLVGDNHRAFVHFDKLSDYLAEHP
DDGKLGSEGLLSGLRVMSVDLGLRTSASISVFRVARKDELKPNSKGRVPF
FFPIKGNDNLVAVHERSQLLKLPGETESKDLRAIREERQRTLRQLRTQLA
YLRLLVRCGSEDVGRRERSWAKLIEQPVDAANHMTPDWREAFENELQKLK
SLHGICSDKEWMDAVYESVRRVWRHMGKQVRDWRKDVRSGERPKIRGYAK
DVVGGNSIEQIEYLERQYKFLKSWSFFGKVSGQVIRAEKGSRFAITLREH
IDHAKEDRLKKLADRIIMEALGYVYALDERGKGKWVAKYPPCQLILLEEL
SEYQFNNDRPPSENNQLMQWSHRGVFQELINQAQVHDLLVGTMYAAFSSR
FDARTGAPGIRCRRVPARCTQEHNPEPFPWWLNKFVVEHTLDACPLRADD
LIPTGEGEIFVSPFSAEEGDFHQIHADLNAAQNLQQRLWSDFDISQIRLR
CDWGEVDGELVLIPRLTGKRTADSYSNKVFYTNTGVTYYERERGKKRRKV
FAQEKLSEEEAELLVEADEAREKSVVLMRDPSGIINRGNWTRQKEFWSMV
NQRIEGYLVKQIRSRVPLQDSACENTGDI

### C2c2 (Uniprot.Org/Uniprot/P0DOC6)

>sp|P0DOC6|C2C2_LEPSD CRISPR-associated
endoribonuclease C2c2 OS = Leptotrichia
shahii (strain DSM 19757/CCUG 47503/
CIP 107916/JCM 16776/LB37)
GN = c2c2 PE = 1 SV = 1
(SEQ ID NO: 693)
MGNLFGHKRWYEVRDKKDFKIKRKVKVKRNYDGNKYILNINENNNKEKID
NNKFIRKYINYKKNDNILKEFTRKFHAGNILFKLKGKEGIIRIENNDDFL
ETEEVVLYIEAYGKSEKLKALGITKKKIIDEAIRQGITKDDKKIEIKRQE
NEEEIEIDIRDEYTNKTLNDCSIILRIIENDELETKKSIYEIFKNINMSL
YKIIEKIIENETEKVFENRYYEEHLREKLLKDDKIDVILTNFMEIREKIK
SNLEILGFVKFYLNVGGDKKKSKNKKMLVEKILNINVDLTVEDIADFVIK
ELEFWNITKRIEKVKKVNNEFLEKRRNRTYIKSYVLLDKHEKFKIERENK
KDKIVKFFVENIKNNSIKEKIEKILAEFKIDELIKKLEKELKKGNCDTEI
FGIFKKHYKVNFDSKKFSKKSDEEKELYKIIYRYLKGRIEKILVNEQKVR
LKKMEKIEIEKILNESILSEKILKRVKQYTLEHIMYLGKLRHNDIDMTTV
NTDDFSRLHAKEELDLELITFFASTNMELNKIFSRENINNDENIDFFGGD
REKNYVLDKKILNSKIKIIRDLDFIDNKNNITNNFIRKFTKIGTNERNRI
LHAISKERDLQGTQDDYNKVINIIQNLKISDEEVSKALNLDVVFKDKKNI
ITKINDIKISEENNNDIKYLPSFSKVLPEILNLYRNNPKNEPFDTIETEK
IVLNALIYVNKELYKKLILEDDLEENESKNIFLQELKKTLGNIDEIDENI
IENYYKNAQISASKGNNKAIKKYQKKVIECYIGYLRKNYEELFDFSDFKM
NIQEIKKQIKDINDNKTYERITVKTSDKTIVINDDFEYIISIFALLNSNA
VINKIRNRFFATSVWLNTSEYQNIIDILDEIMQLNTLRNECITENWNLNL
EEFIQKMKEIEKDFDDFKIQTKKEIFNNYYEDIKNNILTEFKDDINGCDV
LEKKLEKIVIFDDETKFEIDKKSNILQDEQRKLSNINKKDLKKKVDQYIK
DKDQEIKSKILCRIIFNSDFLKKYKKEIDNLIEDMESENENKFQEIYYPK
ERKNELYIYKKNLFLNIGNPNFDKIYGLISNDIKMADAKFLFNIDGKNIR
KNKISEIDAILKNLNDKLNGYSKEYKEKYIKKLKENDDFFAKNIQNKNYK
SFEKDYNRVSEYKKIRDLVEFNYLNKIESYLIDINWKLAIQMARFERDMH
YIVNGLRELGIIKLSGYNTGISRAYPKRNGSDGFYTTTAYYKFFDEESYK
KFEKICYGFGIDLSENSEINKPENESIRNYISHFYIVRNPFADYSIAEQI
DRVSNLLSYSTRYNNSTYASVFEVFKKDVNLDYDELKKKFKLIGNNDILE
RLMKPKKVSVLELESYNSDYIKNLIIELLTKIENTNDTL

C2c3, translated from >CEPX01008730.1 marine metagenome genome assembly TARA_037_MES_0.1-0.22, contig TARA_037_MES_0.1-0.22_scaffold22115_1, whole genome shotgun sequence.

(SEQ ID NO: 694)
MRSNYHGGRNARQWRKQISGLARRTKETVFTYKFPLETDAAEIDFDKAVQ
TYGIAEGVGHGSLIGLVCAFHLSGFRLFSKAGEAMAFRNRSRYPTDAFAE
KLSAIMGIQLPTLSPEGLDLIFQSPPRSRDGIAPVWSENEVRNRLYTNWT
GRGPANKPDEHLLEIAGEIAKQVFPKFGGWDDLASDPDKALAAADKYFQS
QGDFPSIASLPAAIMLSPANSTVDFEGDYIAIDPAAETLLHQAVSRCAAR
LGRERPDLDQNKGPFVSSLQDALVSSQNNGLSWLFGVGFQHWKEKSPKEL
IDEYKVPADQHGAVTQVKSFVDAIPLNPLFDTTHYGEFRASVAGKVRSWV
ANYWKRLLDLKSLLATTEFTLPESISDPKAVSLFSGLLVDPQGLKKVADS
LPARLVSAEEAIDRLMGVGIPTAADIAQVERVADEIGAFIGQVQQFNNQV
KQKLENLQDADDEEFLKGLKIELPSGDKEPPAINTRISGGAPDAAAEISE
LEEKLQRLLDARSEHFQTISEWAEENAVTLDPIAAMVELERLRLAERGAT
GDPEEYALRLLLQRIGRLANRVSPVSAGSIRELLKPVFMEEREFNLFFHN
RLGSLYRSPYSTSRHQPFSIDVGKAKAIDWIAGLDQISSDIEKALSGAGE
ALGDQLRDWINTLAGFAISQRLRGLPDTVPNALAQVRCPDDVRIPPLLAM
LLEEDDIARDVCLKAFNLYVSAINGCLFGALREGFIVRTRFQRIGTDQIH
YVPKDKAWEYPDRLNTAKGPINAAVSSDWIEKDGAVIKPVETVRNLSSTG
FAGAGVSEYLVQAPHDWYTPLDLRDVAHLVTGLPVEKNITKLKRLTNRTA
FRMVGASSFKTHLDSVLLSDKIKLGDFTIIIDQHYRQSVTYGGKVKISYE
PERLQVEAAVPVVDTRDRTVPEPDTLFDHIVAIDLGERSVGFAVFDIKSC
LRTGEVKPIHDNNGNPVVGTVAVPSIRRLMKAVRSHRRRRQPNQKVNQTY
STALQNYRENVIGDVCNRIDTLMERYNAFPVLEFQIKNFQAGAKQLEIVY
GS

[0164] In some embodiments, the guide nucleotide sequence-programmable DNA-binding protein of any of the fusion proteins provided herein is a Cas9 from archaea (e.g. nanoarchaea), which constitute a domain and kingdom of single-celled prokaryotic microbes. In some embodiments, the guide nucleotide sequence-programmable DNA-binding protein is CasX or CasY, which have been described in, for example, Burstein et al., “New CRISPR-Cas systems from uncultivated microbes.” Cell Res. 2017 Feb. 21. doi: 10.1038/cr.2017.21, which is incorporated herein by reference. Using genome-resolved metagenomics, a number of CRISPR-Cas systems were identified, including the first reported Cas9 in the archaeal domain of life. This divergent Cas9 protein was found in nanoarchaea as part of an active CRISPR-Cas system. In bacteria, two previously unknown systems were discovered. CRISPR-CasX and CRISPR-CasY, which are among the most compact systems yet discovered. In some embodiments, Cas9 refers to CasX, or a variant of CasX. In some embodiments, Cas9 refers to a CasY, or a variant of CasY. It should be appreciated that other RNA-guided DNA binding proteins may be used as a guide nucleotide sequence-programmable DNA-binding protein and are within the scope of this disclosure.

[0165] In some embodiments, the guide nucleotide sequence-programmable DNA-binding protein of any of the fusion proteins provided herein is a CasX or CasY protein. In some embodiments, the guide nucleotide sequence-programmable DNA-binding protein is a CasX protein. In some embodiments, the guide nucleotide sequence-programmable DNA-binding protein is a CasY protein. In some embodiments, the guide nucleotide sequence-programmable DNA-binding protein comprises an amino acid sequence that is at least 85%, at least 90%, at least 91%, at least 92%, at least 93%, at least 94%, at least 95%, at least 96%, at least 97%, at least 98%, at least 99%, or at least 99.5% identical to a naturally-occurring CasX or CasY protein. In some embodiments, the guide nucleotide sequence-programmable DNA-binding protein is a naturally-occurring CasX or CasY protein. In some embodiments, the guide nucleotide sequence-programmable DNA-binding protein comprises an amino acid sequence that is at least 85%, at least 90%, at least 91%, at least 92%, at least 93%, at least 94%, at least 95%, at least 96%, at least 97%, at least 98%, at least 99%, or at least 99.5% identical to any one of SEQ ID NOs: 695-697. In some embodiments, the guide nucleotide sequence-programmable DNA-binding protein comprises an amino acid sequence of any one of SEQ ID NOs: 695-697. It should be appreciated that CasX and CasY from other bacterial species may also be used in accordance with the present disclosure.

### CasX (Uniprot.Org/Uniprot/F0NN87; Uniprot.Org/Uniprot/F0NH53)

>tr|F0NN87|F0NN87_SULIH CRISPR-associated
Casx protein OS = Sulfolobus islandicus
(strain HVE10/4) GN = SiH_0402 PE = 4 SV = 1
(SEQ ID NO: 695)
MEVPLYNIFGDNYIIQVATEAENSTIYNNKVEIDDEELRNVLNLAYKIAK
NNEDAAAERRGKAKKKKGEEGETTTSNIILPLSGNDKNPWTETLKCYNFP
TTVALSEVFKNFSQVKECEEVSAPSFVKPEFYEFGRSPGMVERTRRVKLE
VEPHYLIIAAAGWVLTRLGKAKVSEGDYVGVNVFTPTRGILYSLIQNVNG
IVPGIKPETAFGLWIARKVVSSVTNPNVSVVRIYTISDAVGQNPTTINGG
FSIDLTKLLEKRYLLSERLEAIARNALSISSNMRERYIVLANYIYEYLTG
SKRLEDLLYFANRDLIMNLNSDDGKVRDLKLISAYVNGELIRGEG
>tr|F0NH53|F0NH53_SULIR CRISPR associated
protein, Casx OS = Sulfolobus islandicus
(strain REY15A) GN = SiRe_0771 PE = 4 SV = 1
(SEQ ID NO: 696)
MEVPLYNIFGDNYIIQVATEAENSTIYNNKVEIDDEELRNVLNLAYKIAK
NNEDAAAERRGKAKKKKGEEGETTTSNIILPLSGNDKNPWTETLKCYNFP
TTVALSEVFKNFSQVKECEEVSAPSFVKPEFYKFGRSPGMVERTRRVKLE
VEPHYLIMAAAGWVLTRLGKAKVSEGDYVGVNVFTPTRGILYSLIQNVNG
IVPGIKPETAFGLWIARKVVSSVTNPNVSVVSIYTISDAVGQNPTTINGG
FSIDLTKLLEKRDLLSERLEAIARNALSISSNMRERYIVLANYIYEYLTG
SKRLEDLLYFANRDLIMNLNSDDGKVRDLKLISAYVNGELIRGEG

### CasY (Ncbi.Nlm.Nih.Gov/Protein/APG80656.1)

>APG80656.1 CRISPR-associated protein CasY
[uncultured Parcubacteria group bacterium]
(SEQ ID NO: 697)
MSKRHPRISGVKGYRLHAQRLEYTGKSGAMRTIKYPLYSSPSGGRTVPRE
IVSAINDDYVGLYGLSNFDDLYNAEKRNEEKVYSVLDFWYDCVQYGAVFS
YTAPGLLKNVAEVRGGSYELTKTLKGSHLYDELQIDKVIKFLNKKEISRA
NGSLDKLKKDIIDCFKAEYRERHKDQCNKLADDIKNAKKDAGASLGERQK
KLFRDFFGISEQSENDKPSFTNPLNLTCCLLPFDTVNNNRNRGEVLFNKL
KEYAQKLDKNEGSLEMWEYIGIGNSGTAFSNFLGEGFLGRLRENKITELK
KAMMDITDAWRGQEQEEELEKRLRILAALTIKLREPKFDNHWGGYRSDIN
GKLSSWLQNYINQTVKIKEDLKGHKKDLKKAKEMINRFGESDTKEEAVVS
SLLESIEKIVPDDSADDEKPDIPAIAIYRRFLSDGRLTLNRFVQREDVQE
ALIKERLEAEKKKKPKKRKKKSDAEDEKETIDFKELFPHLAKPLKLVPNF
YGDSKRELYKKYKNAAIYTDALWKAVEKIYKSAFSSSLKNSFFDTDFDKD
FFIKRLQKIFSVYRRFNTDKWKPIVKNSFAPYCDIVSLAENEVLYKPKQS
RSRKSAAIDKNRVRLPSTENIAKAGIALARELSVAGFDWKDLLKKEEHEE
YIDLIELHKTALALLLAVTETQLDISALDFVENGTVKDFMKTRDGNLVLE
GRFLEMFSQSIVFSELRGLAGLMSRKEFITRSAIQTMNGKQAELLYIPHE
FQSAKITTPKEMSRAFLDLAPAEFATSLEPESLSEKSLLKLKQMRYYPHY
FGYELTRTGQGIDGGVAENALRLEKSPVKKREIKCKQYKTLGRGQNKIVL
YVRSSYYQTQFLEWFLHRPKNVQTDVAVSGSFLIDEKKVKTRWNYDALTV
ALEPVSGSERVFVSQPFTIFPEKSAEEEGQRYLGIDIGEYGIAYTALEIT
GDSAKILDQNFISDPQLKTLREEVKGLKLDQRRGTFAMPSTKIARIRESL
VHSLRNRIHHLALKHKAKIVYELEVSRFEEGKQKIKKVYATLKKADVYSE
IDADKNLQTTVWGKLAVASEISASYTSQFCGACKKLWRAEMQVDETITTQ
ELIGTVRVIKGGTLIDAIKDFMRPPIFDENDTPFPKYRDFCDKHHISKKM
RGNSCLFICPFCRANADADIQASQTIALLRYVKEEKKVEDYFERFRKLKN
IKVLGQMKKI

### Cas9 Domains of Nucleobase Editors

[0168] Non-limiting, exemplary Cas9 domains are provided herein. The Cas9 domain may be a nuclease active Cas9 domain, a nucleasae inactive Cas9 domain, or a Cas9 nickase. In some embodiments, the Cas9 domain is a nuclease active domain. For example, the Cas9 domain may be a Cas9 domain that cuts both strands of a duplexed nucleic acid (e.g., both strands of a duplexed DNA molecule). In some embodiments, the Cas9 domain comprises any one of the amino acid sequences as set forth herein. In some embodiments the Cas9 domain comprises an amino acid sequence that is at least 60%, at least 65%, at least 70%, at least 75%, at least 80%, at least 85%, at least 90%, at least 95%, at least 96%, at least 97%, at least 98%, at least 99%, or at least 99.5% identical to any one of the amino acid sequences set forth herein. In some embodiments, the Cas9 domain comprises an amino acid sequence that has 1, 2, 3, 4, 5, 6, 7, 8, 9, 10, 11, 12, 13, 14, 15, 16, 17, 18, 19, 20, 21, 22, 21, 24, 25, 26, 27, 28, 29, 30, 31, 32, 33, 34, 35, 36, 37, 38, 39, 40, 41, 42, 43, 44, 45, 46, 47, 48, 49, 50, or more mutations compared to any one of the amino acid sequences set forth herein. In some embodiments, the Cas9 domain comprises an amino acid sequence that has at least 10, at least 15, at least 20, at least 30, at leat 40, at least 50, at least 60, at least 70, at least 80, at least 90, at least 100, at least 150, at least 200, at least 250, at least 300, at least 350, at least 400, at least 500, at least 600, at least 700, at least 800, at least 900, at least 1000, at least 1100, or at least 1200 identical contiguous amino acid residues as compared to any one of the amino acid sequences set forth herein.

[0169] In some embodiments, the Cas9 domain is a nuclease-inactive Cas9 domain (dCas9). For example, the dCas9 domain may bind to a duplexed nucleic acid molecule (e.g., via a gRNA molecule) without cleaving either strand of the duplexed nucleic acid molecule. In some embodiments, the nuclease-inactive dCas9 domain comprises a DIOX mutation and a H840X mutation or a corresponding mutation in any of the amino acid sequences provided in any of the Cas9 proteins provided herein, wherein X is any amino acid change. In some embodiments, the nuclease-inactive dCas9 domain comprises a D10A mutation and a H840A mutation or a corresponding mutation in any of the amino acid sequences provided in any of the Cas9 proteins provided herein. As one example, a nuclease-inactive Cas9 domain comprises the amino acid sequence set forth in SEQ ID NO: 698 (Cloning vector pPlatTET-gRNA2. Accession No. BAV54124).

MDKKYSIGLAIGTNSVGWAVITDEYKVPSKKFKVLGNTDRHSIKKNLIGA
LLFDSGETAEATRLKRTARRRYTRRKNRICYLQEIFSNEMAKVDDSFFHR
LEESFLVEEDKKHERHPIFGNIVDEVAYHEKYPTIYHLRKKLVDSTDKAD
LRLIYLALAHMIKFRGHFLIEGDLNPDNSDVDKLFIQLVQTYNQLFEENP
INASGVDAKAILSARLSKSRRLENLIAQLPGEKKNGLFGNLIALSLGLTP
NFKSNFDLAEDAKLQLSKDTYDDDLDNLLAQIGDQYADLFLAAKNLSDAI
LLSDILRVNTEITKAPLSASMIKRYDEHHQDLTLLKALVRQQLPEKYKEI
FFDQSKNGYAGYIDGGASQEEFYKFIKPILEKMDGTEELLVKLNREDLLR
KQRTFDNGSIPHQIHLGELHAILRRQEDFYPFLKDNREKIEKILTFRIPY
YVGPLARGNSRFAWMTRKSEETITPWNFEEVVDKGASAQSFIERMTNFDK
NLPNEKVLPKHSLLYEYFTVYNELTKVKYVTEGMRKPAFLSGEQKKAIVD
LLFKTNRKVTVKQLKEDYFKKIECFDSVEISGVEDRFNASLGTYHDLLKI
IKDKDFLDNEENEDILEDIVLTLTLFEDREMIEERLKTYAHLFDDKVMKQ
LKRRRYTGWGRLSRKLINGIRDKQSGKTILDFLKSDGFANRNFMQLIHDD
SLTFKEDIQKAQVSGQGDSLHEHIANLAGSPAIKKGILQTVKVVDELVKV
MGRHKPENIVIEMARENQTTQKGQKNSRERMKRIEEGIKELGSQILKEHP
VENTQLQNEKLYLYYLQNGRDMYVDQELDINRLSDYDVDAIVPQSFLKDD
SIDNKVLTRSDKNRGKSDNVPSEEVVKKMKNYWRQLLNAKLITQRKFDNL
TKAERGGLSELDKAGFIKRQLVETRQITKHVAQILDSRMNTKYDENDKLI
REVKVITLKSKLVSDFRKDFQFYKVREINNYHHAHDAYLNAVVGTALIKK
YPKLESEFVYGDYKVYDVRKMIAKSEQEIGKATAKYFFYSNIMNFFKTEI
TLANGEIRKRPLIETNGETGEIVWDKGRDFATVRKVLSMPQVNIVKKTEV
QTGGFSKESILPKRNSDKLIARKKDWDPKKYGGFDSPTVAYSVLVVAKVE
KGKSKKLKSVKELLGITIMERSSFEKNPIDFLEAKGYKEVKKDLIIKLPK
YSLFELENGRKRMLASAGELQKGNELALPSKYVNFLYLASHYEKLKGSPE
DNEQKQLFVEQHKHYLDEIIEQISEFSKRVILADANLDKVLSAYNKHRDK
PIREQAENIIHLFTLTNLGAPAAFKYFDTTIDRKRYTSTKEVLDATLIHQ
SITGLYETRIDLSQLGGD
(SEQ ID NO: 698; see, e.g., Qi et al., Repurposing
CRISPR as an RNA-guided platform for sequence-
specific control of gene expression. Cell. 2013;
152(5): 1173-83, the entire contents of which are
incorporated herein by reference).

[0170] Additional suitable nuclease-inactive dCas9 domains will be apparent to those of skill in the art based on this disclosure and knowledge in the field, and are within the scope of this disclosure. Such additional exemplary suitable nuclease-inactive Cas9 domains include, but are not limited to, D10A/H840A, D10A/D839A/H840A, and D10A/D839A/H840A/N863A mutant domains (See. e.g., Prashant et al., CAS9 transcriptional activators for target specificity screening and paired nickases for cooperative genome engineering. Nature Biotechnology. 2013; 31(9): 833-838, the entire contents of which are incorporated herein by reference). In some embodiments the dCas9 domain comprises an amino acid sequence that is at least 60%, at least 65%, at least 70%, at least 75%, at least 80%, at least 85%, at least 90%, at least 95%, at least 96%, at least 97%, at least 98%, at least 99%, or at least 99.5% identical to any one of the dCas9 domains provided herein. In some embodiments, the Cas9 domain comprises an amino acid sequences that has 1, 2, 3, 4, 5, 6, 7, 8, 9, 10, 11, 12, 13, 14, 15, 16, 17, 18, 19, 20, 21, 22, 21, 24, 25, 26, 27, 28, 29, 30, 31, 32, 33, 34, 35, 36, 37, 38, 39, 40, 41, 42, 43, 44, 45, 46, 47, 48, 49, 50 or more mutations compared to any one of the amino acid sequences of Cas9 or a Cas9 variant set forth herein. In some embodiments, the Cas9 domain comprises an amino acid sequence that has at least 10, at least 15, at least 20, at least 30, at leat 40, at least 50, at least 60, at least 70, at least 80, at least 90, at least 100, at least 150, at least 200, at least 250, at least 300, at least 350, at least 400, at least 500, at least 600, at least 700, at least 800, at least 900, at least 1000, at least 1100, or at least 1200 identical contiguous amino acid residues as compared to any one of the amino acid sequences of Cas9 or a Cas9 variant set forth herein.

[0171] In some embodiments, the Cas9 domain is a Cas9 nickase. The Cas9 nickase may be a Cas9 protein that is capable of cleaving only one strand of a duplexed nucleic acid molecule (e.g., a duplexed DNA molecule). In some embodiments the Cas9 nickase cleaves the target strand of a duplexed nucleic acid molecule, meaning that the Cas9 nickase cleaves the strand that is base paired to (complementary to) a gRNA (e.g., an sgRNA) that is bound to the Cas9. In some embodiments, a Cas9 nickase comprises a D10A mutation and has a histidine at position 840. For example, a Cas9 nickase may comprise the amino acid sequence as set forth in SEQ ID NO: 683. In some embodiments the Cas9 nickase comprises an amino acid sequence that is at least 60%, at least 65%, at least 70%, at least 75%, at least 80%, at least 85%, at least 90%, at least 95%, at least 96%, at least 97%, at least 98%, at least 99%, or at least 99.5% identical to any one of the Cas9 nickases provided herein. Additional suitable Cas9 nickases will be apparent to those of skill in the art based on this disclosure and knowledge in the field, and are within the scope of this disclosure.

Cas9 Domains with Reduced PAM Exclusivity

[0172] Some aspects of the disclosure provide Cas9 domains that have different PAM specificities. Typically, Cas9 proteins, such as Cas9 from S. pyogenes (spCas9), require a canonical NGG PAM sequence to bind a particular nucleic acid region. This may limit the ability to edit desired bases within a genome. In some embodiments, the base editing fusion proteins provided herein may need to be placed at a precise location, for example where a target base is placed within a four base region (e.g., a “deamination window”), which is approximately 15 bases upstream of the PAM. See Komor. A. C., et al., “Programmable editing of a target base in genomic DNA without double-stranded DNA cleavage” Nature 533, 420-424 (2016), the entire contents of which are hereby incorporated by reference. Accordingly, in some embodiments, any of the fusion proteins provided herein may contain a Cas9 domain that is capable of binding a nucleotide sequence that does not contain a canonical (e.g., NGG) PAM sequence and has relaxed PAM requirements (PAMless Cas9). PAMless Cas9 exhibits an increased activity on a target sequence that does not include a canonical PAM (e.g., NGG) sequence at its 3′-end as compared to Streptococcus pyogenes Cas9 as provided by SEQ ID NO: 1, e.g., increased activity by at least 5-fold, at least 10-fold, at least 50-fold, at least 100-fold, at least 500-fold, at least 1,000-fold, at least 5,000-fold, at least 10,000-fold, at least 50,000-fold, at least 100.000-fold, at least 500,000-fold, or at least 1,000,000-fold, Cas9 domains that bind to non-canonical PAM sequences have been described in the art and would be apparent to the skilled artisan. For example, Cas9 domains that bind non-canonical PAM sequences have been described in Kleinstiver, B. P., et al., “Engineered CRISPR-Cas9 nucleases with altered PAM specificities” Nature 523, 481-485 (2015); and Kleinstiver, B. P., et al., “Broadening the targeting range of Staphylococcus aureus CRISPR-Cas9 by modifying PAM recognition” Nature Biotechnology 33, 1293-1298 (2015); the entire contents of each are hereby incorporated by reference. See also US Provisional Applications, U.S. Ser. No. 62/245,828, filed Oct. 23, 2015; 62/279,346, filed Jan. 15, 2016; 62/311,763, filed Mar. 22, 2016; 62/322,178, filed Apr. 13, 2016; and 62/357,332, filed Jun. 30, 2016, each of which is incorporated herein by reference. In some embodiments, the dCas9 or Cas9 nickase useful in the present disclosure may further comprise mutations that relax the PAM requirements, e.g., mutations that correspond to A262T, K294R, S409I, E480K, E543D, M694I, or E1219V in SEQ ID NO: 1.

[0173] In some embodiments, the Cas9 domain is a Cas9 domain from Staphylococcus aureus (SaCas9). In some embodiments, the SaCas9 domain is a nuclease active SaCas9, a nuclease inactive SaCas9 (SaCas9d), or a SaCas9 nickase (SaCas9n). In some embodiments, the SaCas9 comprises the amino acid sequence SEQ ID NO: 699. In some embodiments, the SaCas9 comprises a N579X mutation of SEQ ID NO: 699, or a corresponding mutation in any of the amino acid sequences provided in any of the Cas9 proteins disclosed herein including, but not limited to, SEQ ID NOs: 1-260, 270-292, 315-323, 680, and 682, wherein X is any amino acid except for N. In some embodiments, the SaCas9 comprises a N579A mutation of SEQ ID NO: 699, or a corresponding mutation in any of the amino acid sequences provided in SEQ ID NOs: 1-260, 272-292, 315-323, 680, and 682. In some embodiments, the SaCas9 domain, the SaCas9d domain, or the SaCas9n domain can bind to a nucleic acid sequence having a non-canonical PAM. In some embodiments, the SaCas9 domain, the SaCas9d domain, or the SaCas9n domain can bind to a nucleic acid sequence having a NNGRRT PAM sequence. In some embodiments, the SaCas9 domain comprises one or more of a E781X, a N967X, and a R1014X mutation of SEQ ID NO: 699, or a corresponding mutation in any of the Cas9 amino acid sequences provided herein, including but not limited to in SEQ ID NOs: 1-260, 270-292, 315-323, 680, or 682, wherein X is any amino acid. In some embodiments, the SaCas9 domain comprises one or more of a E781K, a N967K. and a R1014H mutation of SEQ ID NO: 699, or one or more corresponding mutation in any of the Cas9 amino acid sequences provided herein, including but not limited to in SEQ ID NOs: 1-260, 270-292, 315-323, 680, or 682. In some embodiments, the SaCas9 domain comprises a E781K, a N967K, or a R1014H mutation of SEQ ID NO: 699, or one or more corresponding mutation in any of the Cas9 amino acid sequences provided herein, including but not limited to in SEQ ID NOs: 1-260, 270-292, 315-323, 680, or 682.

[0174] In some embodiments, the Cas9 domain of any of the fusion proteins provided herein comprises an amino acid sequence that is at least 60%, at least 65%, at least 70%, at least 75%, at least 80%, at least 85%, at least 90%, at least 95%, at least 96%, at least 97%, at least 98%, at least 99%, or at least 99.5% identical to any one of SEQ ID NOs: 699-701. In some embodiments, the Cas9 domain of any of the fusion proteins provided herein comprises the amino acid sequence of any one of SEQ ID NOs: 699-701. In some embodiments, the Cas9 domain of any of the fusion proteins provided herein consists of the amino acid sequence of any one of SEQ ID NOs: 699-701.

### Exemplary SaCas9 Sequence

(SEQ ID NO: 699)
KRNYILGLDIGITSVGYGIIDYETRDVIDAGVRLFKEANVENNEGRRSKR
GARRLKRRRRHRIQRVKKLLFDYNLLTDHSELSGINPYEARVKGLSQKLS
EEEFSAALLHLAKRRGVHNVNEVEEDTGNELSTKEQISRNSKALEEKYVA
ELQLERLKKDGEVRGSINRFKTSDYVKEAKQLLKVQKAYHQLDQSFIDTY
IDLLETRRTYYEGPGEGSPFGWKDIKEWYEMLMGHCTYFPEELRSVKYAY
NADLYNALNDLNNLVITRDENEKLEYYEKFQIIENVFKQKKKPTLKQIAK
EILVNEEDIKGYRVTSTGKPEFTNLKVYHDIKDITARKEIIENAELLDQI
AKILTIYQSSEDIQEELTNLNSELTQEEIEQISNLKGYTGTHNLSLKAIN
LILDELWHTNDNQIAIFNRLKLVPKKVDLSQQKEIPTTLVDDFILSPVVK
RSFIQSIKVINAIIKKYGLPNDIIIELAREKNSKDAQKMINEMQKRNRQT
NERIEEIIRTTGKENAKYLIEKIKLHDMQEGKCLYSLEAIPLEDLLNNPF
NYEVDHIIPRSVSFDNSFNNKVLVKQEENSKKGNRTPFQYLSSSDSKISY
ETFKKHILNLAKGKGRISKTKKEYLLEERDINRFSVQKDFINRNLVDTRY
ATRGLMNLLRSYFRVNNLDVKVKSINGGFTSFLRRKWKFKKERNKGYKHH
AEDALIIANADFIFKEWKKLDKAKKVMENQMFEEKQAESMPEIETEQEYK
EIFITPHQIKHIKDFKDYKYSHRVDKKPNRELINDTLYSTRKDDKGNTLI
VNNLNGLYDKDNDKLKKLINKSPEKLLMYHHDPQTYQKLKLIMEQYGDEK
NPLYKYYEETGNYLTKYSKKDNGPVIKKIKYYGNKLNAHLDITDDYPNSR
NKVVKLSLKPYRFDVYLDNGVYKFVTVKNLDVIKKENYYEVNSKCYEEAK
KLKKISNQAEFIASFYNNDLIKINGELYRVIGVNNDLLNRIEVNMIDITY
REYLENMNDKRPPRIIKTIASKTQSIKKYSTDILGNLYEVKSKKHPQIIK
KG

Residue N579 of SEQ ID NO: 699, which is underlined and in bold, may be mutated (e.g., to a A579) to yield a SaCas9 nickase.

### Exemplary SaCas9d Sequence

(SEQ ID NO: 702)
KRNYILGLAIGITSVGYGIIDYETRDVIDAGVRLFKEANVENNEGRRSKR
GARRLKRRRRHRIQRVKKLLFDYNLLTDHSELSGINPYEARVKGLSQKLS
EEEFSAALLHLAKRRGVHNVNEVEEDTGNELSTKEQISRNSKALEEKYVA
ELQLERLKKDGEVRGSINTRFKTSDYVKEAKQLLKVQKAYHQLDQSFIDT
YIDLLETRRTYYEGPGEGSPFGWKDIKEWYEMLMGHCTYFPEELRSVKYA
YNADLYNALNDLNNLVITRDENEKLEYYEKFQIIENVFKQKKKPTLKQIA
KEILVNEEDIKGYRVTSTGKPEFTNLKVYHDIKDITARKEIIENAELLDQ
IAKILTIYQSSEDIQEELTNLNSELTQEEIEQISNLKGYTGTHNLSLKAI
NLILDELWHTNDNQIAIFNRLKLVPKKVDLSQQKEIPTTLVDDFILSPVV
KRSFIQSIKVINAIIKKYGLPNDIIIELAREKNSKDAQKMINEMQKRNRQ
TNERIEEIIRTTGKENAKYLIEKIKLHDMQEGKCLYSLEAIPLEDLLNNP
FNYEVDHIIPRSVSFDNSFNNKVLVKQEENSKKGNRTPFQYLSSSDSKIS
YETFKKHILNLAKGKGRISKTKKEYLLEERDINRFSVQKDFINRNLVDTR
YATRGLMNLLRSYFRVNNLDVKVKSINGGFTSFLRRKWKFKKERNKGYKH
HAEDALIIANADFIFKEWKKLDKAKKVMENQMFEEKQAESMPEIETEQEY
KEIFITPHQIKHIKDFKDYKYSHRVDKKPNRELINDTLYSTRKDDKGNTL
IVNNLNGLYDKDNDKLKKLINKSPEKLLMYHHDPQTYQKLKLIMEQYGDE
KNPLYKYYEETGNYLTKYSKKDNGPVIKKIKYYGNKLNAHLDITDDYPNS
RNKVVKLSLKPYRFDVYLDNGVYKFVTVKNLDVIKKENYYEVNSKCYEEA
KKLKKISNQAEFIASFYNNDLIKINGELYRVIGVNNDLLNRIEVNMIDIT
YREYLENMNDKRPPRIIKTIASKTQSIKKYSTDILGNLYEVKSKKHPQII
KKG.

Residue D10 of SEQ ID NO: 702, which is underlined and in bold, may be mutated (e.g., to a A10) to yield a nuclease inactive SaCas9d.

### Exemplary SaCas9n Sequence

(SEQ ID NO: 700)
KRNYILGLDIGITSVGYGIIDYETRDVIDAGVRLFKEANVENNEGRRSKR
GARRLKRRRRHRIQRVKKLLFDYNLLTDHSELSGINPYEARVKGLSQKLS
EEEFSAALLHLAKRRGVHNVNEVEEDTGNELSTKEQISRNSKALEEKYVA
ELQLERLKKDGEVRGSINTRFKTSDYVKEAKQLLKVQKAYHQLDQSFIDT
YIDLLETRRTYYEGPGEGSPFGWKDIKEWYEMLMGHCTYFPEELRSVKYA
YNADLYNALNDLNNLVITRDENEKLEYYEKFQIIENVFKQKKKPTLKQIA
KEILVNEEDIKGYRVTSTGKPEFTNLKVYHDIKDITARKEIIENAELLDQ
IAKILTIYQSSEDIQEELTNLNSELTQEEIEQISNLKGYTGTHNLSLKAI
NLILDELWHTNDNQIAIFNRLKLVPKKVDLSQQKEIPTTLVDDFILSPVV
KRSFIQSIKVINAIIKKYGLPNDIIIELAREKNSKDAQKMINEMQKRNRQ
TNERIEEIIRTTGKENAKYLIEKIKLHDMQEGKCLYSLEAIPLEDLLNNP
FNYEVDHIIPRSVSFDNSFNNKVLVKQEEASKKGNRTPFQYLSSSDSKIS
YETFKKHILNLAKGKGRISKTKKEYLLEERDINRFSVQKDFINRNLVDTR
YATRGLMNLLRSYFRVNNLDVKVKSINGGFTSFLRRKWKFKKERNKGYKH
HAEDALIIANADFIFKEWKKLDKAKKVMENQMFEEKQAESMPEIETEQEY
KEIFITPHQIKHIKDFKDYKYSHRVDKKPNRELINDTLYSTRKDDKGNTL
IVNNLNGLYDKDNDKLKKLINKSPEKLLMYHHDPQTYQKLKLIMEQYGDE
KNPLYKYYEETGNYLTKYSKKDNGPVIKKIKYYGNKLNAHLDITDDYPNS
RNKVVKLSLKPYRFDVYLDNGVYKFVTVKNLDVIKKENYYEVNSKCYEEA
KKLKKISNQAEFIASFYNNDLIKINGELYRVIGVNNDLLNRIEVNMIDIT
YREYLENMNDKRPPRIIKTIASKTQSIKKYSTDILGNLYEVKSKKHPQII
KKG.

Residue A579 of SEQ ID NO: 700, which can be mutated from N579 of SEQ ID NO: 699 to yield a SaCas9 nickase, is underlined and in bold.

### Exemplary SaKKH Cas9

(SEQ ID NO: 701)
KRNYILGLDIGITSVGYGIIDYETRDVIDAGVRLFKEANVENNEGRRSKR
GARRLKRRRRHRIQRVKKLLFDYNLLTDHSELSGINPYEARVKGLSQKLS
EEEFSAALLHLAKRRGVHNVNEVEEDTGNELSTKEQISRNSKALEEKYVA
ELQLERLKKDGEVRGSINTRFKTSDYVKEAKQLLKVQKAYHQLDQSFIDT
YIDLLETRRTYYEGPGEGSPFGWKDIKEWYEMLMGHCTYFPEELRSVKYA
YNADLYNALNDLNNLVITRDENEKLEYYEKFQIIENVFKQKKKPTLKQIA
KEILVNEEDIKGYRVTSTGKPEFTNLKVYHDIKDITARKEIIENAELLDQ
IAKILTIYQSSEDIQEELTNLNSELTQEEIEQISNLKGYTGTHNLSLKAI
NLILDELWHTNDNQIAIFNRLKLVPKKVDLSQQKEIPTTLVDDFILSPVV
KRSFIQSIKVINAIIKKYGLPNDIIIELAREKNSKDAQKMINEMQKRNRQ
TNERIEEIIRTTGKENAKYLIEKIKLHDMQEGKCLYSLEAIPLEDLLNNP
FNYEVDHIIPRSVSFDNSFNNKVLVKQEEASKKGNRTPFQYLSSSDSKIS
YETFKKHILNLAKGKGRISKTKKEYLLEERDINRFSVQKDFINRNLVDTR
YATRGLMNLLRSYFRVNNLDVKVKSINGGFTSFLRRKWKFKKERNKGYKH
HAEDALIIANADFIFKEWKKLDKAKKVMENQMFEEKQAESMPEIETEQEY
KEIFITPHQIKHIKDFKDYKYSHRVDKKPNRKLINDTLYSTRKDDKGNTL
IVNNLNGLYDKDNDKLKKLINKSPEKLLMYHHDPQTYQKLKLIMEQYGDE
KNPLYKYYEETGNYLTKYSKKDNGPVIKKIKYYGNKLNAHLDITDDYPNS
RNKVVKLSLKPYRFDVYLDNGVYKFVTVKNLDVIKKENYYEVNSKCYEEA
KKLKKISNQAEFIASFYKNDLIKINGELYRVIGVNNDLLNRIEVNMIDIT
YREYLENMNDKRPPHIIKTIASKTQSIKKYSTDILGNLYEVKSKKHPQII
KKG.

Residue A579 of SEQ ID NO: 701, which can be mutated from N579 of SEQ ID NO: 699 to yield a SaCas9 nickase, is underlined and in bold. Residues K781, K967, and H1014 of SEQ ID NO: 701, which can be mutated from E781, N967, and R1014 of SEQ ID NO: 699 to yield a SaKKH Cas9 are underlined and in italics.

[0179] In some embodiments, the Cas9 domain is a Cas9 domain from Streptococcus pyogenes (SpCas9). In some embodiments, the SpCas9 domain is a nuclease active SpCas9, a nuclease inactive SpCas9 (SpCas9d), or a SpCas9 nickase (SpCas9n). In some embodiments, the SpCas9 comprises the amino acid sequence SEQ ID NO: 703. In some embodiments, the SpCas9 comprises a D9X mutation of SEQ ID NO: 703, or a corresponding mutation in any of the Cas9 amino acid sequences provided herein, including but not limited to SEQ ID NOs: 1-260, 270-292, 315-323, 680, or 682, wherein X is any amino acid except for D. In some embodiments, the SpCas9 comprises a D9A mutation of SEQ ID NO: 703, or a corresponding mutation in any of the Cas9 amino acid sequences provided herein, including but not limited to SEQ ID NOs: 1-260, 270-292, 315-323, 680, or 682. In some embodiments, the SpCas9 domain, the SpCas9d domain, or the SpCas9n domain can bind to a nucleic acid sequence having a non-canonical PAM. In some embodiments, the SpCas9 domain, the SpCas9d domain, or the SpCas9n domain can bind to a nucleic acid sequence having a NGG, a NGA, or a NGCG PAM sequence. In some embodiments, the SpCas9 domain comprises one or more of a D1134X, a R1334X. and a T1336X mutation of SEQ ID NO: 703, or a corresponding mutation in any of the Cas9 amino acid sequences provided herein, including but not limited to SEQ ID NOs: 1-260, 270-292, 315-323, 680, or 682, wherein X is any amino acid. In some embodiments, the SpCas9 domain comprises one or more of a D1134E, R1334Q, and T1336R mutation of SEQ ID NO: 703, or a corresponding mutation in any of the Cas9 amino acid sequences provided herein, including but not limited to SEQ ID NOs: 1-260, 270-292, 315-323, 680, or 682. In some embodiments, the SpCas9 domain comprises a D1134E, a R1334Q, and a T1336R mutation of SEQ ID NO: 703, or a corresponding mutation in any of the Cas9 amino acid sequences provided herein, including but not limited to SEQ ID NOs: 1-260, 270-292, 315-323, 680, or 682. In some embodiments, the SpCas9 domain comprises one or more of a D1134X, a R1334X, and a T1336X mutation of SEQ ID NO: 703, or a corresponding mutation in any of the Cas9 amino acid sequences provided herein, including but not limited to SEQ ID NOs: 1-260, 270-292, 315-323, 680, or 682, wherein X is any amino acid. In some embodiments, the SpCas9 domain comprises one or more of a D1134V, a R1334Q, and a T1336R mutation of SEQ ID NO: 703, or a corresponding mutation in any of the Cas9 amino acid sequences provided herein, including but not limited to SEQ ID NOs: 1-260, 270-292, 315-323, 680, or 682. In some embodiments, the SpCas9 domain comprises a D1134V, a R1334Q, and a T1336R mutation of SEQ ID NO: 703, or a corresponding mutation in any of the Cas9 amino acid sequences provided herein, including but not limited to SEQ ID NOs: 1-260, 270-292, 315-323, 680, or 682. In some embodiments, the SpCas9 domain comprises one or more of a D1134X, a G1217X, a R1334X, and a T1336X mutation of SEQ ID NO: 703, or a corresponding mutation in any of the Cas9 amino acid sequences provided herein, including but not limited to SEQ ID NOs: 1-260, 270-292, 315-323, 680, or 682, wherein X is any amino acid. In some embodiments, the SpCas9 domain comprises one or more of a D1134V, a G1217R, a R1334Q. and a T1336R mutation of SEQ ID NO: 703, or a corresponding mutation in any of the Cas9 amino acid sequences provided herein, including but not limited to, SEQ ID NOs: 1-260, 270-292, 315-323, 680, or 682. In some embodiments, the SpCas9 domain comprises a D1134V, a G1217R, a R1334Q, and a T1336R mutation of SEQ ID NO: 703, or a corresponding mutation in any of the Cas9 amino acid sequences provided herein, including but not limited to SEQ ID NOs: 1-260, 270-292, 315-323, 680, or 682.

[0180] In some embodiments, the Cas9 domain of any of the fusion proteins provided herein comprises an amino acid sequence that is at least 60%, at least 65%, at least 70%, at least 75%, at least 80%, at least 85%, at least 90%, at least 95%, at least 96%, at least 97%, at least 98%, at least 99%, or at least 99.5% identical to any one of SEQ ID NOs: 4276-4280. In some embodiments, the Cas9 domain of any of the fusion proteins provided herein comprises the amino acid sequence of any one of SEQ ID NOs: 703-707. In some embodiments, the Cas9 domain of any of the fusion proteins provided herein consists of the amino acid sequence of any one of SEQ ID NOs: 703-707.

### Exemplary SpCas9

(SEQ ID NO: 703)
DKKYSIGLDIGTNSVGWAVITDEYKVPSKKFKVLGNTDRHSIKKNLIGAL
LFDSGETAEATRLKRTARRRYTRRKNRICYLQEIFSNEMAKVDDSFFHRL
EESFLVEEDKKHERHPIFGNIVDEVAYHEKYPTIYHLRKKLVDSTDKADL
RLIYLALAHMIKFRGHFLIEGDLNPDNSDVDKLFIQLVQTYNQLFEENPI
NASGVDAKAILSARLSKSRRLENLIAQLPGEKKNGLFGNLIALSLGLTPN
FKSNFDLAEDAKLQLSKDTYDDDLDNLLAQIGDQYADLFLAAKNLSDAIL
LSDILRVNTEITKAPLSASMIKRYDEHHQDLTLLKALVRQQLPEKYKEIF
FDQSKNGYAGYIDGGASQEEFYKFIKPILEKMDGTEELLVKLNREDLLRK
QRTFDNGSIPHQIHLGELHAILRRQEDFYPFLKDNREKIEKILTFRIPYY
VGPLARGNSRFAWMTRKSEETITPWNFEEVVDKGASAQSFIERMTNFDKN
LPNEKVLPKHSLLYEYFTVYNELTKVKYVTEGMRKPAFLSGEQKKAIVDL
LFKTNRKVTVKQLKEDYFKKIECFDSVEISGVEDRFNASLGTYHDLLKII
KDKDFLDNEENEDILEDIVLTLTLFEDREMIEERLKTYAHLFDDKVMKQL
KRRRYTGWGRLSRKLINGIRDKQSGKTILDFLKSDGFANRNFMQLIHDDS
LTFKEDIQKAQVSGQGDSLHEHIANLAGSPAIKKGILQTVKVVDELVKVM
GRHKPENIVIEMARENQTTQKGQKNSRERMKRIEEGIKELGSQILKEHPV
ENTQLQNEKLYLYYLQNGRDMYVDQELDINRLSDYDVDHIVPQSFLKDDS
IDNKVLTRSDKNRGKSDNVPSEEVVKKMKNYWRQLLNAKLITQRKFDNLT
KAERGGLSELDKAGFIKRQLVETRQITKHVAQILDSRMNTKYDENDKLIR
EVKVITLKSKLVSDFRKDFQFYKVREINNYHHAHDAYLNAVVGTALIKKY
PKLESEFVYGDYKVYDVRKMIAKSEQEIGKATAKYFFYSNIMNFFKTEIT
LANGEIRKRPLIETNGETGEIVWDKGRDFATVRKVLSMPQVNIVKKTEVQ
TGGFSKESILPKRNSDKLIARKKDWDPKKYGGFDSPTVAYSVLVVAKVEK
GKSKKLKSVKELLGITIMERSSFEKNPIDFLEAKGYKEVKKDLIIKLPKY
SLFELENGRKRMLASAGELQKGNELALPSKYVNFLYLASHYEKLKGSPED
NEQKQLFVEQHKHYLDEIIEQISEFSKRVILADANLDKVLSAYNKHRDKP
IREQAENIIHLFTLTNLGAPAAFKYFDTTIDRKRYTSTKEVLDATLIHQS
ITGLYETRIDLSQLGGD

### Exemplary SpCas9n

(SEQ ID NO: 704)
DKKYSIGLAIGTNSVGWAVITDEYKVPSKKFKVLGNTDRHSIKKNLIGAL
LFDSGETAEATRLKRTARRRYTRRKNRICYLQEIFSNEMAKVDDSFFHRL
EESFLVEEDKKHERHPIFGNIVDEVAYHEKYPTIYHLRKKLVDSTDKADL
RLIYLALAHMIKFRGHFLIEGDLNPDNSDVDKLFIQLVQTYNQLFEENPI
NASGVDAKAILSARLSKSRRLENLIAQLPGEKKNGLFGNLIALSLGLTPN
FKSNFDLAEDAKLQLSKDTYDDDLDNLLAQIGDQYADLFLAAKNLSDAIL
LSDILRVNTEITKAPLSASMIKRYDEHHQDLTLLKALVRQQLPEKYKEIF
FDQSKNGYAGYIDGGASQEEFYKFIKPILEKMDGTEELLVKLNREDLLRK
QRTFDNGSIPHQIHLGELHAILRRQEDFYPFLKDNREKIEKILTFRIPYY
VGPLARGNSRFAWMTRKSEETITPWNFEEVVDKGASAQSFIERMTNFDKN
LPNEKVLPKHSLLYEYFTVYNELTKVKYVTEGMRKPAFLSGEQKKAIVDL
LFKTNRKVTVKQLKEDYFKKIECFDSVEISGVEDRFNASLGTYHDLLKII
KDKDFLDNEENEDILEDIVLTLTLFEDREMIEERLKTYAHLFDDKVMKQL
KRRRYTGWGRLSRKLINGIRDKQSGKTILDFLKSDGFANRNFMQLIHDDS
LTFKEDIQKAQVSGQGDSLHEHIANLAGSPAIKKGILQTVKVVDELVKVM
GRHKPENIVIEMARENQTTQKGQKNSRERMKRIEEGIKELGSQILKEHPV
ENTQLQNEKLYLYYLQNGRDMYVDQELDINRLSDYDVDHIVPQSFLKDDS
IDNKVLTRSDKNRGKSDNVPSEEVVKKMKNYWRQLLNAKLITQRKFDNLT
KAERGGLSELDKAGFIKRQLVETRQITKHVAQILDSRMNTKYDENDKLIR
EVKVITLKSKLVSDFRKDFQFYKVREINNYHHAHDAYLNAVVGTALIKKY
PKLESEFVYGDYKVYDVRKMIAKSEQEIGKATAKYFFYSNIMNFFKTEIT
LANGEIRKRPLIETNGETGEIVWDKGRDFATVRKVLSMPQVNIVKKTEVQ
TGGFSKESILPKRNSDKLIARKKDWDPKKYGGFDSPTVAYSVLVVAKVEK
GKSKKLKSVKELLGITIMERSSFEKNPIDFLEAKGYKEVKKDLIIKLPKY
SLFELENGRKRMLASAGELQKGNELALPSKYVNFLYLASHYEKLKGSPED
NEQKQLFVEQHKHYLDEIIEQISEFSKRVILADANLDKVLSAYNKHRDKP
IREQAENIIHLFTLTNLGAPAAFKYFDTTIDRKRYTSTKEVLDATLIHQS
ITGLYETRIDLSQLGGD

### Exemplary SpEQR Cas9

(SEQ ID NO: 705)
DKKYSIGLAIGTNSVGWAVITDEYKVPSKKFKVLGNTDRHSIKKNLIGAL
LFDSGETAEATRLKRTARRRYTRRKNRICYLQEIFSNEMAKVDDSFFHRL
EESFLVEEDKKHERHPIFGNIVDEVAYHEKYPTIYHLRKKLVDSTDKADL
RLIYLALAHMIKFRGHFLIEGDLNPDNSDVDKLFIQLVQTYNQLFEENPI
NASGVDAKAILSARLSKSRRLENLIAQLPGEKKNGLFGNLIALSLGLTPN
FKSNFDLAEDAKLQLSKDTYDDDLDNLLAQIGDQYADLFLAAKNLSDAIL
LSDILRVNTEITKAPLSASMIKRYDEHHQDLTLLKALVRQQLPEKYKEIF
FDQSKNGYAGYIDGGASQEEFYKFIKPILEKMDGTEELLVKLNREDLLRK
QRTFDNGSIPHQIHLGELHAILRRQEDFYPFLKDNREKIEKILTFRIPYY
VGPLARGNSRFAWMTRKSEETITPWNFEEVVDKGASAQSFIERMTNFDKN
LPNEKVLPKHSLLYEYFTVYNELTKVKYVTEGMRKPAFLSGEQKKAIVDL
LFKTNRKVTVKQLKEDYFKKIECFDSVEISGVEDRFNASLGTYHDLLKII
KDKDFLDNEENEDILEDIVLTLTLFEDREMIEERLKTYAHLFDDKVMKQL
KRRRYTGWGRLSRKLINGIRDKQSGKTILDFLKSDGFANRNFMQLIHDDS
LTFKEDIQKAQVSGQGDSLHEHIANLAGSPAIKKGILQTVKVVDELVKVM
GRHKPENIVIEMARENQTTQKGQKNSRERMKRIEEGIKELGSQILKEHPV
ENTQLQNEKLYLYYLQNGRDMYVDQELDINRLSDYDVDHIVPQSFLKDDS
IDNKVLTRSDKNRGKSDNVPSEEVVKKMKNYWRQLLNAKLITQRKFDNLT
KAERGGLSELDKAGFIKRQLVETRQITKHVAQILDSRMNTKYDENDKLIR
EVKVITLKSKLVSDFRKDFQFYKVREINNYHHAHDAYLNAVVGTALIKKY
PKLESEFVYGDYKVYDVRKMIAKSEQEIGKATAKYFFYSNIMNFFKTEIT
LANGEIRKRPLIETNGETGEIVWDKGRDFATVRKVLSMPQVNIVKKTEVQ
TGGFSKESILPKRNSDKLIARKKDWDPKKYGGFESPTVAYSVLVVAKVEK
GKSKKLKSVKELLGITIMERSSFEKNPIDFLEAKGYKEVKKDLIIKLPKY
SLFELENGRKRMLASAGELQKGNELALPSKYVNFLYLASHYEKLKGSPED
NEQKQLFVEQHKHYLDEIIEQISEFSKRVILADANLDKVLSAYNKHRDKP
IREQAENIIHLFTLTNLGAPAAFKYFDTTIDRKQYRSTKEVLDATLIHQS
ITGLYETRIDLSQLGGD

Residues E1134, Q1334, and R1336 of SEQ ID NO: 705, which can be mutated from D1134, R1334, and T1336 of SEQ ID NO: 703 to yield a SpEQR Cas9, are underlined and in bold.

### Exemplary SpVQR Cas9

(SEQ ID NO: 706)
DKKYSIGLAIGTNSVGWAVITDEYKVPSKKFKVLGNTDRHSIKKNLIGAL
LFDSGETAEATRLKRTARRRYTRRKNRICYLQEIFSNEMAKVDDSFFHRL
EESFLVEEDKKHERHPIFGNIVDEVAYHEKYPTIYHLRKKLVDSTDKADL
RLIYLALAHMIKFRGHFLIEGDLNPDNSDVDKLFIQLVQTYNQLFEENPI
NASGVDAKAILSARLSKSRRLENLIAQLPGEKKNGLFGNLIALSLGLTPN
FKSNFDLAEDAKLQLSKDTYDDDLDNLLAQIGDQYADLFLAAKNLSDAIL
LSDILRVNTEITKAPLSASMIKRYDEHHQDLTLLKALVRQQLPEKYKEIF
FDQSKNGYAGYIDGGASQEEFYKFIKPILEKMDGTEELLVKLNREDLLRK
QRTFDNGSIPHQIHLGELHAILRRQEDFYPFLKDNREKIEKILTFRIPYY
VGPLARGNSRFAWMTRKSEETITPWNFEEVVDKGASAQSFIERMTNFDKN
LPNEKVLPKHSLLYEYFTVYNELTKVKYVTEGMRKPAFLSGEQKKAIVDL
LFKTNRKVTVKQLKEDYFKKIECFDSVEISGVEDRFNASLGTYHDLLKII
KDKDFLDNEENEDILEDIVLTLTLFEDREMIEERLKTYAHLFDDKVMKQL
KRRRYTGWGRLSRKLINGIRDKQSGKTILDFLKSDGFANRNFMQLIHDDS
LTFKEDIQKAQVSGQGDSLHEHIANLAGSPAIKKGILQTVKVVDELVKVM
GRHKPENIVIEMARENQTTQKGQKNSRERMKRIEEGIKELGSQILKEHPV
ENTQLQNEKLYLYYLQNGRDMYVDQELDINRLSDYDVDHIVPQSFLKDDS
IDNKVLTRSDKNRGKSDNVPSEEVVKKMKNYWRQLLNAKLITQRKFDNLT
KAERGGLSELDKAGFIKRQLVETRQITKHVAQILDSRMNTKYDENDKLIR
EVKVITLKSKLVSDFRKDFQFYKVREINNYHHAHDAYLNAVVGTALIKKY
PKLESEFVYGDYKVYDVRKMIAKSEQEIGKATAKYFFYSNIMNFFKTEIT
LANGEIRKRPLIETNGETGEIVWDKGRDFATVRKVLSMPQVNIVKKTEVQ
TGGFSKESILPKRNSDKLIARKKDWDPKKYGGFVSPTVAYSVLVVAKVEK
GKSKKLKSVKELLGITIMERSSFEKNPIDFLEAKGYKEVKKDLIIKLPKY
SLFELENGRKRMLASAGELQKGNELALPSKYVNFLYLASHYEKLKGSPED
NEQKQLFVEQHKHYLDEIIEQISEFSKRVILADANLDKVLSAYNKHRDKP
IREQAENIIHLFTLTNLGAPAAFKYFDTTIDRKQYRSTKEVLDATLIHQS
ITGLYETRlDLSQLGGD

Residues V1134, Q1334, and R1336 of SEQ ID NO: 706, which can be mutated from D1134, R1334, and T1336 of SEQ ID NO: 703 to yield a SpVQR Cas9, are underlined and in bold.

### Exemplary SpVRER Cas9

(SEQ ID NO: 707)
DKKYSIGLAIGTNSVGWAVITDEYKVPSKKFKVLGNTDRHSIKKNLIGAL
LFDSGETAEATRLKRTARRRYTRRKNRICYLQEIFSNEMAKVDDSFFHRL
EESFLVEEDKKHERHPIFGNIVDEVAYHEKYPTIYHLRKKLVDSTDKADL
RLIYLALAHMIKFRGHFLIEGDLNPDNSDVDKLFIQLVQTYNQLFEENPI
NASGVDAKAILSARLSKSRRLENLIAQLPGEKKNGLFGNLIALSLGLTPN
FKSNFDLAEDAKLQLSKDTYDDDLDNLLAQIGDQYADLFLAAKNLSDAIL
LSDILRVNTEITKAPLSASMIKRYDEHHQDLTLLKALVRQQLPEKYKEIF
FDQSKNGYAGYIDGGASQEEFYKFIKPILEKMDGTEELLVKLNREDLLRK
QRTFDNGSIPHQIHLGELHAILRRQEDFYPFLKDNREKIEKILTFRIPYY
VGPLARGNSRFAWMTRKSEETITPWNFEEVVDKGASAQSFIERMTNFDKN
LPNEKVLPKHSLLYEYFTVYNELTKVKYVTEGMRKPAFLSGEQKKAIVDL
LFKTNRKVTVKQLKEDYFKKIECFDSVEISGVEDRFNASLGTYHDLLKII
KDKDFLDNEENEDILEDIVLTLTLFEDREMIEERLKTYAHLFDDKVMKQL
KRRRYTGWGRLSRKLINGIRDKQSGKTILDFLKSDGFANRNFMQLIHDDS
LTFKEDIQKAQVSGQGDSLHEHIANLAGSPAIKKGILQTVKVVDELVKVM
GRHKPENIVIEMARENQTTQKGQKNSRERMKRIEEGIKELGSQILKEHPV
ENTQLQNEKLYLYYLQNGRDMYVDQELDINRLSDYDVDHIVPQSFLKDDS
IDNKVLTRSDKNRGKSDNVPSEEVVKKMKNYWRQLLNAKLITQRKFDNLT
KAERGGLSELDKAGFIKRQLVETRQITKHVAQILDSRMNTKYDENDKLIR
EVKVITLKSKLVSDFRKDFQFYKVREINNYHHAHDAYLNAVVGTALIKKY
PKLESEFVYGDYKVYDVRKMIAKSEQEIGKATAKYFFYSNIMNFFKTEIT
LANGEIRKRPLIETNGETGEIVWDKGRDFATVRKVLSMPQVNIVKKTEVQ
TGGFSKESILPKRNSDKLIARKKDWDPKKYGGFVSPTVAYSVLVVAKVEK
GKSKKLKSVKELLGITIMERSSFEKNPIDFLEAKGYKEVKKDLIIKLPKY
SLFELENGRKRMLASARELQKGNELALPSKYVNFLYLASHYEKLKGSPED
NEQKQLFVEQHKHYLDEIIEQISEFSKRVILADANLDKVLSAYNKHRDKP
IREQAENIIHLFTLTNLGAPAAFKYFDTTIDRKEYRSTKEVLDATLIHQS
ITGLYETRIDLSQLGGD

Residues V1134, R1217, Q1334, and R1336 of SEQ ID NO: 707, which can be mutated from D1134, G1217, R1334, and T1336 of SEQ ID NO: 703 to yield a SpVRER Cas9, are underlined and in bold.

### High Fidelity Base Editors

[0186] Some aspects of the disclosure provide Cas9 fusion proteins (e.g., any of the fusion proteins provided herein) comprising a Cas9 domain that has high fidelity. Additional aspects of the disclosure provide Cas9 fusion proteins (e.g., any of the fusion proteins provided herein) comprising a Cas9 domain with decreased electrostatic interactions between the Cas9 domain and a sugar-phosphate backbone of a DNA, as compared to a wild-type Cas9 domain. In some embodiments, a Cas9 domain (e.g., a wild type Cas9 domain) comprises one or more mutations that decreases the association between the Cas9 domain and a sugar-phosphate backbone of a DNA. In some embodiments, any of the Cas9 fusion proteins provided herein comprise one or more of a N497X, a R661X, a Q695X. and/or a Q926X mutation of the amino acid sequence provided in SEQ ID NO: 1, or a corresponding mutation in any of the Cas9 amino acid sequences provided herein, including but not limited to the sequences seen in SEQ ID NOs: 1-260, 270-292, and 315-323, wherein X is any amino acid. In some embodiments, any of the Cas9 fusion proteins provided herein comprise one or more of a N497A, a R661A, a Q695A, and/or a Q926A mutation of the amino acid sequence provided in SEQ ID NO: 1, or a corresponding mutation in any of the Cas9 amino acid sequences provided herein, including but not limited to the sequences seen in SEQ ID NOs: 1-260, 270-292, 315-323, 680, and 682. In some embodiments, the Cas9 domain comprises a D10A mutation of the amino acid sequence provided in SEQ ID NO: 1, or a corresponding mutation in any of the Cas9 amino acid sequences provided herein, including but not limited to the sequences seen in SEQ ID NOs: 1-260, 270-292, 315-323, 680, and 682. In some embodiments, the Cas9 domain (e.g., of any of the fusion proteins provided herein) comprises the amino acid sequence as set forth in SEQ ID NO: 708. In some embodiments, the fusion protein comprises the amino acid sequence as set forth in SEQ ID NO: 709, Cas9 domains with high fidelity are known in the art and would be apparent to the skilled artisan. For example, Cas9 domains with high fidelity have been described in Kleinstiver, B. P., et al. “High-fidelity CRISPR-Cas9 nucleases with no detectable genome-wide off-target effects.” Nature 529, 490-495 (2016); and Slaymaker. I. M., et al. “Rationally engineered Cas9 nucleases with improved specificity.” Science 351, 84-88 (2015); the entire contents of each are incorporated herein by reference.

[0187] It should be appreciated that the base editors provided herein, for example, base editor 2 (BE2) or base editor 3 (BE3), may be converted into high fidelity base editors by modifying the Cas9 domain as described herein to generate high fidelity base editors, for example, high fidelity base editor 2 (HF-BE2) or high fidelity base editor 3 (HF-BE3). In some embodiments, base editor 2 (BE2) comprises a deaminase domain, a dCas9 domain, and a UGI domain. In some embodiments, base editor 3 (BE3) comprises a deaminase domain, a nCas9 domain, and a UGI domain.

Cas9 Domain where Mutations Relative to Cas9 of SEQ ID NO: 1 are Shown in Bold and Underlines

(SEQ ID NO: 708)
DKKYSIGLAIGTNSVGWAVITDEYKVPSKKFKVLGNTDRHSIKKNLIGAL
LFDSGETALATRLKRTARRRYTRRKNRICYLQEIFSNEMAKVDDSFFHRL
EESFLVEEDKKHERHPIFGNIVDEVAYHEKYPTIYHLRKKLVDSTDKADL
RLIYLALAHMIKFRGHFLIEGDLNPDNSDVDKLFIQLVQTYNQLFEENPI
NASGVDAKAILSARLSKSRRLENLIAQLPGEKKNGLFGNLIALSLGLTPN
FKSNFDLAEDAKLQLSKDTYDDDLDNLLAQIGDQYADLFLAAKNLSDAIL
LSDILRVNTEITKAPLSASMIKRYDEHHQDLTLLKALVRQQLPEKYKEIF
FDQSKNGYAGYIDGGASQLEFYKFIKPILEKMDGTEELLVKLNREDLLRK
QRTFDNGSIPHQIHLGELHAILRRQEDFYPFLKDNREKIEKILTFRIPYY
VGPLARGNSRFAWMTRKSEETITPWNFEEVVDKGASAQSFIERMTAFDKN
LPNEKVLPKHSLLYEYFTVYNELTKVKYVTEGMRKPAFLSGEQKKAIVDL
LFKTNRKVTVKQLKEDYFKKIECFDSVEISGVEDRFNASLGTYHDLLKII
KDKDFLDNEENEDILEDIVLTLTLFEDREMIEERLKTYAHLFDDKVMKQL
KRRRYTGWGALSRKLINGIRDKQSGKTILDFLKSDGFANRNFMALIHDDS
LTFKEDIQKAQVSGQGDSLHEHIANLAGSPAIKKGILQTVKVVDELVKVM
GRHKPENIVIEMARENQTTQKGQKNSRERMKRIEEGIKELGSQILKEHPV
ENTQLQNEKLYLYYLQNGRDMYVDQELDINRLSDYDVDHIVPQSFLKDDS
IDNKVLTRSDKNRGKSDNVPSEEVVKKMKNYWRQLLNAKLITQRKFDNLT
KAERGGLSELDKAGFIKRQLVETRAITKHVAQILDSRMNTKYDENDKLIR
EVKVITLKSKLVSDFRKDFQFYKVREINNYHHAHDAYLNAVVGTALIKKY
PKLESEFVYGDYKVYDVRKMIAKSEQEIGKATAKYFFYSNIMNFFKTEIT
LANGEIRKRPLIETNGETGEIVWDKGRDFATVRKVLSMPQVNIVKKTEVQ
TGGFSKESILPKRNSDKLIARKKDWDPKKYGGFDSPTVAYSVLVVAKVEK
GKSKKLKSVKELLGITIMERSSFEKNPIDFLEAKGYKEVKKDLIIKLPKY
SLFELENGRKRMLASAGELQKGNELALPSKYVNFLYLASHYEKLKGSPED
NEQKQLFVEQHKHYLDEIIEQISEFSKRVILADANLDKVLSAYNKHRDKP
IREQAENIIHLFTLTNLGAPAAFKYFDTTIDRKRYTSTKEVLDATLIHQS
ITGLYETRIDLSQLGGD

### HF-BE3

(SEQ ID NO: 709)
MSSETGPVAVDPTLRRRIEPHEFEVFFDPRELRKETCLLYEINWGGRHSI
WRHTSQNTNKHVEVNFIEKFTTERYFCPNTRCSITWFLSWSPCGECSRAI
TEFLSRYPHVTLFIYIARLYHHADPRNRQGLRDLISSGVTIQIMTEQESG
YCWRNFVNYSPSNEAHWPRYPHLWVRLYVLELYCIILGLPPCLNILRRKQ
PQLTFFTIALQSCHYQRLPPHILWATGLKSGSETPGTSESATPESDKKYS
IGLAIGTNSVGWAVITDEYKVPSKKFKVLGNTDRHSIKKNLIGALLFDSG
ETAEATRLKRTARRRYTRRKNRICYLQEIFSNEMAKVDDSFFHRLEESFL
VEEDKKHERHPIFGNIVDEVAYHEKYPTIYHLRKKLVDSTDKADLRLIYL
ALAHMIKFRGHFLIEGDLNPDNSDVDKLFIQLVQTYNQLFEENPINASGV
DAKAILSARLSKSRRLENLIAQLPGEKKNGLFGNLIALSLGLTPNFKSNF
DLAEDAKLQLSKDTYDDDLDNLLAQIGDQYADLFLAAKNLSDAILLSDIL
RVNTEITKAPLSASMIKRYDEHHQDLTLLKALVRQQLPEKYKEIFFDQSK
NGYAGYIDGGASQEEFYKFIKPILEKMDGTEELLVKLNREDLLRKQRTFD
NGSIPHQIHLGELHAILRRQEDFYPFLKDNREKIEKILTFRIPYYVGPLA
RGNSRFAWMTRKSEETITPWNFEEVVDKGASAQSFIERMTAFDKNLPNEK
VLPKHSLLYEYFTVYNELTKVKYVTEGMRKPAFLSGEQKKAIVDLLFKTN
RKVTVKQLKEDYFKKIECFDSVEISGVEDRFNASLGTYHDLLKIIKDKDF
LDNEENEDILEDIVLTLTLFEDREMIEERLKTYAHLFDDKVMKQLKRRRY
TGWGALSRKLINGIRDKQSGKTILDFLKSDGFANRNFMALIHDDSLTFKE
DIQKAQVSGQGDSLHEHIANLAGSPAIKKGILQTVKVVDELVKVMGRHKP
ENIVIEMARENQTTQKGQKNSRERMKRIEEGIKELGSQILKEHPVENTQL
QNEKLYLYYLQNGRDMYVDQELDINRLSDYDVDHIVPQSFLKDDSIDNKV
LTRSDKNRGKSDNVPSEEVVKKMKNYWRQLLNAKLITQRKFDNLTKAERG
GLSELDKAGFIKRQLVETRAITKHVAQILDSRMNTKYDENDKLIREVKVI
TLKSKLVSDFRKDFQFYKVREINNYHHAHDAYLNAVVGTALIKKYPKLES
EFVYGDYKVYDVRKMIAKSEQEIGKATAKYFFYSNIMNFFKTEITLANGE
IRKRPLIETNGETGEIVWDKGRDFATVRKVLSMPQVNIVKKTEVQTGGFS
KESILPKRNSDKLIARKKDWDPKKYGGFDSPTVAYSVLVVAKVEKGKSK
KLKSVKELLGITIMERSSFEKNPIDFLEAKGYKEVKKDLIIKLPKYSLFE
LENGRKRMLASAGELQKGNELALPSKYVNFLYLASHYEKLKGSPEDNEQK
QLFVEQHKHYLDEIIEQISEFSKRVILADANLDKVLSAYNKHRDKPIREQ
AENIIHLFTLTNLGAPAAFKYFDTTIDRKRYTSTKEVLDATLIHQSITGL
YETRIDLSQLGGD

### Fusion Proteins Comprising Gam

[0189] Some aspects of the disclosure provide fusion proteins comprising a Gam protein. Some aspects of the disclosure provide base editors that further comprise a Gam protein. Base editors are known in the art and have been described previously, for example, in U.S. Patent Application Publication Nos.: U.S. 2015-0166980, published Jun. 18, 2015; U.S. 2015-0166981, published Jun. 18, 2015; U.S. 2015-0166984, published Jun. 18, 2015; U.S. 2015-01669851, published Jun. 18, 2015; U.S. 2016-0304846, published Oct. 20, 2016; U.S. 2017-0121693-A1, published May 4, 2017; and PCT Application publication Nos.: WO 2015089406, published Jun. 18, 2015; and WO2017070632, published Apr. 27, 2017; the entire contents of each of which are hereby incorporated by reference. A skilled artisan would understand, based on the disclosure, how to make and use base editors that further comprise a Gam protein.

[0190] In some embodiments, the disclosure provides fusion proteins comprising a guide nucleotide sequence-programmable DNA-binding protein and a Gam protein. In some embodiments, the disclosure provides fusion proteins comprising a cytidine deaminase domain and a Gam protein. In some embodiments, the disclosure provides fusion proteins comprising a UGI domain and a Gam protein. In some embodiments, the disclosure provides fusion proteins comprising a guide nucleotide sequence-programmable DNA-binding protein, a cytidine deaminase domain and a Gam protein. In some embodiments, the disclosure provides fusion proteins comprising a guide nucleotide sequence-programmable DNA-binding protein, a cytidine deaminase domain a Gam protein and a UGI domain.

[0191] In some embodiments, the Gam protein is a protein that binds to double strand breaks in DNA and prevents or inhibits degradation of the DNA at the double strand breaks. In some embodiments, the Gam protein is encoded by the bacteriophage Mu, which binds to double stranded breaks in DNA. Without wishing to be bound by any particular theory. Mu transposes itself between bacterial genomes and uses Gam to protect double stranded breaks in the transposition process. Gam can be used to block homologous recombination with sister chromosomes to repair double strand breaks, sometimes leading to cell death. The survival of cells exposed to UV is similar for cells expression Gam and cells where the recB is mutated. This indicates that Gam blocks DNA repair (Cox, 2013). The Gam protein can thus promote Cas9-mediated killing (Cui et al., 2016). GamGFP is used to label double stranded breaks, although this can be difficult in eukaryotic cells as the Gam protein competes with similar eukaryotic protein Ku (Shee et al., 2013).

[0192] Gam is related to Ku70 and Ku80, two eukaryotic proteins involved in non-homologous DNA end-joining (Cui et al., 2016). Gam has sequence homology with both subunits of Ku (Ku70 and Ku80), and can have a similar structure to the core DNA-binding region of Ku. Orthologs to Mu Gam are present in the bacterial genomes of Haemophilus influenzae, Salmonella typhi, Neisseria meningitidis, and the enterohemorrhagic O157:H7 strain of E. coli (d'Adda di Fagagna et al., 2003). Gam proteins have been described previously, for example, in COX, Proteins pinpoint double strand breaks, eLife. 2013; 2: e01561.; Cui et al., Consequences of Cas9 cleavage in the chromosome of Escherichia coli. Nucleic Acids Res. 2016 May 19; 44(9):4243-51. doi: 10.1093/nar/gkw223. Epub 2016 Apr. 8.; D'ADDA DI FAGAGNA et al., The Gam protein of bacteriophage Mu is an orthologue of eukaryotic Ku. EMBO Rep. 2003 January; 4(1):47-52.; and SHEE et al., Engineered proteins detect spontaneous DNA breakage in human and bacterial cells. Elife. 2013 Oct. 29; 2:e01222. doi: 10.7554/eLife.01222; the contents of each of which are incorporated herein by reference.

[0193] In some embodiments, the Gam protein is a protein that binds double strand breaks in DNA and prevents or inhibits degradation of the DNA at the double strand breaks. In some embodiments, the Gam protein is a naturally occurring Gam protein from any organism (e.g., a bacterium), for example, any of the organisms provided herein. In some embodiments, the Gam protein is a variant of a naturally-occurring Gam protein from an organism. In some embodiments, the Gam protein does not occur in nature. In some embodiments, the Gam protein is at least 50%, at least 55%, at least 60%, at least 65%, at least 70%, at least 75% at least 80%, at least 85%, at least 90%, at least 95%, at least 96%, at least 97%, at least 98%, at least 99%, or at least 99.5% identical to a naturally-occurring Gam protein. In some embodiments, the Gam protein is at least 50%, at least 55%, at least 60%, at least 65%, at least 70%, at least 75% at least 80%, at least 85%, at least 90%, at least 95%, at least 96%, at least 97%, at least 98%, at least 99%, or at least 99.5% identical to any of the Gam proteins provided herein (e.g., SEQ ID NO: 9). Exemplary Gam proteins are provided below. In some embodiments, the Gam protein comprises any of the Gam proteins provided herein (e.g., SEQ ID NO: 710-734). In some embodiments, the Gam protein is a truncated version of any of the Gam proteins provided herein. In some embodiments, the truncated Gam protein is missing 1, 2, 3, 4, 5, 6, 7, 8, 9, 10, 11, 12, 13, 14, 15, 6, 17, 18, 19, or 20 N-terminal amino acid residues relative to a full-length Gam protein. In some embodiments, the truncated Gam protein may be missing 1, 2, 3, 4, 5, 6, 7, 8, 9, 10, 11, 12, 13, 14, 15, 6, 17, 18, 19, or 20 C-terminal amino acid residues relative to a full-length Gam protein. In some embodiments, the Gam protein does not comprise an N-terminal methionine.

[0194] In some embodiments, the Gam protein comprises an amino acid sequence that is at least 60%, at least 65%, at least 70%, at least 75%, at least 80%, at least 85%, at least 90%, at least 95, at least 98%, at least 99%, or at least 99.5% identical to any of the Gam proteins provided herein. In some embodiments, the Gam protein comprises an amino acid sequence that has 1, 2, 3, 4, 5, 6, 7, 8, 9, 10, 11, 12, 13, 14, 15, 16, 17, 18, 19, 20, 21, 22, 21, 24, 25, 26, 27, 28, 29, 30, 31, 32, 33, 34, 35, 36, 37, 38, 39, 40, 41, 42, 43, 44, 45, 46, 47, 48, 49, 50 or more mutations compared to any one of the Gam Proteins provided herein (e.g., SEQ ID NOs: 710-734). In some embodiments, the Gam protein comprises an amino acid sequence that has at least 5, at least 10, at least 15, at least 20, at least 25, at least 30, at least 35, at least 40, at least 45, at least 50, at least 60, at least 70, at least 80, at least 90, at least 100, at least 110, at least 120, at least 130, at least 140, at least 150, at least 160, or at least 170, identical contiguous amino acid residues as compared to any of the Gam proteins provided herein. In some embodiments, the Gam protein comprises the amino acid sequence of any of the Gam proteins provided herein. In some embodiments, the Gam protein consists of the any of the Gam proteins provided herein (e.g., SEQ ID NO: 710 or 711-734).

### Gam Form Bacteriophage Mu

(SEQ ID NO: 710)
AKPAKRIKSAAAAYVPQNRDAVITDIKRIGDLQREASRLETEMNDAIAEI
TEKFAARIAPIKTDIETLSKGVQGWCEANRDELTNGGKVKTANLVTGDVS
WRVRPPSVSIRGMDAVMETLERLGLQRFIRTKQEINKEAILLEPKAVAGV
AGITVKSGIEDFSIIPFEQEAGI

>WP_001107930.1 MULTISPECIES: host-nuclease inhibitor protein Gam [Enterobacteriaceae]

(SEQ ID NO: 711)
MAKPAKRIKSAAAAYVPQNRDAVITDIKRIGDLQREASRLETEMNDAIAE
ITEKFAARIAPIKTDIETLSKGVQGWCEANRDELTNGGKVKTANLVTGDV
SWRVRPPSVSIRGMDAVMETLERLGLQRFIRTKQEINKEAILLEPKAVAG
VAGITVKSGIEDFSIIPFEQEAGI

>CAA27978.1 unnamed protein product [Escherichia virus Mu]

(SEQ ID NO: 712)
MAKPAKRIKSAAAAYVPQNRDAVITDIKRIGDLQREASRLETEMNDAIAE
ITEKFAARIAPIKTDIETLSKGVQGWCEANRDELTNGGKVKTANLVTGDV
SWRVRPPSVSIRGMDAVMETLERLGLQRFVRTKQEINKEAILLEPKAVAG
VAGITVKSGIEDFSIIPFEQEAGI

>WP_001107932.1 host-nuclease inhibitor protein Gam [Escherichia coli]

(SEQ ID NO: 713)
MAKPAKRIKSAAAAYVPQNRDAVITDIKRIGDLQREASRLETEMNDAIAE
ITEKFAARIAPLKTDIETLSKGVQGWCEANRDELTNGGKVKTANLVTGDV
SWRVRPPSVSIRGMDAVMETLERLGLQRFIRTKQEINKEAILLEPKAVAG
VAGITVKSGIEDFSIIPFEQEAGI

>WP_061335739.1 host-nuclease inhibitor protein Gam [Escherichia coli]

(SEQ ID NO: 714)
MAKPAKRIKSAAAAYVPQNRDAVITDIKRIGDLQREASRLETEMNDAIAE
ITEKFAARIAPIKTDIETLSKGVQGWCEANRDELTNGGKVKTANLITGDV
SWRVRPPSVSIRGMDAVMETLERLGLQRFIRTKQEINKEAILLEPKAVAG
VAGITVKSGIEDFSIIPFEQEAGI

>WP_001107937.1 MULTISPECIES: host-nuclease inhibitor protein Gam [Enterobacteriaceae]>EJL11163.1 bacteriophage Mu Gam like family protein [Shigella sonnei str. Moseley]>CSO81529.1 host-nuclease inhibitor protein [Shigella sonnei]>OCE38605.1 host-nuclease inhibitor protein Gam [Shigella sonnei]>SJK50067.1 host-nuclease inhibitor protein [Shigella sonnei]>SJK19110.1 host-nuclease inhibitor protein [Shigella sonnei]>SIY81859.1 host-nuclease inhibitor protein [Shigella sonnei]>SJJ34359.1 host-nuclease inhibitor protein [Shigella sonnei]>SJK07688.1 host-nuclease inhibitor protein [Shigella sonnei]>SJI95156.1 host-nuclease inhibitor protein [Shigella sonnei]>SIY86865.1 host-nuclease inhibitor protein [Shigella sonnei]>SJJ67303.1 host-nuclease inhibitor protein [Shigella sonnei]>SJJ18596.1 host-nuclease inhibitor protein [Shigella sonnei]>SIX52979.1 host-nuclease inhibitor protein [Shigella sonnei]>SJD05143.1 host-nuclease inhibitor protein [Shigella sonnei]>SJD37118.1 host-nuclease inhibitor protein [Shigella sonnei]>SJE51616.1 host-nuclease inhibitor protein [Shigella sonnei]

(SEQ ID NO: 715)
MAKPAKRIRNAAAAYVPQSRDAVVCDIRRIGDLQREAARLETEMNDAIAE
ITEKYASQIAPLKTSIETLSKGVQGWCEANRDELTNGGKVKTANLVTGDV
SWRQRPPSVSlRGVDAVMETLERLGLQRFIRTKQEINKEAILLEPKAVAG
VAGITVKSGIEDFSIIPFEQEAGI

>WP_089552732.1 host-nuclease inhibitor protein Gam [Escherichia coli]

(SEQ ID NO: 716)
MAKPAKRIKNAAAAYVPQSRDAVVCDIRRIGDLQREAARLETEMNDAIAE
ITEKYASQIAPLKTSIETISKGVQGWCEANRDELTNGGKVKTANLVTGDV
SWRQRPPSVSlRGVDAVMETLERLGLQRFIRTKQEINKEAILLEPKAVAG
VAGITVKSGIEDFSIIPFEQEAGI

>WP_042856719.1 host-nuclease inhibitor protein Gam [Escherichia coli]>CDL02915.1 putative host-nuclease inhibitor protein [Escherichia coli IS35]

(SEQ ID NO: 717)
MAKPAKRIKNAAAAYVPQSRDAVVCDIRRIGDLQREAARLETEMNDAIAD
ITEKYASQIAPLKTSIETLSKGVQGWCEANRDELTNGGKVKTANLVTGDV
SWRQRPPSVSlRGVDAVMETLERLGLQRFIRTKQEINKEAILLEPKAVAG
VAGITVKSGIEDFSIIPFEQEAGI

>WP_001129704.1 host-nuclease inhibitor protein Gam [Escherichia coli]>EDU62392.1 bacteriophage Mu Gam like protein [Escherichia coli 53638]

(SEQ ID NO: 718)
MAKSAKRIRNAAAAYVPQSRDAVVCDIRRIGNLQREAARLETEMNDAIAE
ITEKFAARIAPLKTDIETLSKGVQGWCEANRDELTNGGKVKTANLVTGDV
SWRQRPPSVSlRGVDAVMETLERLGLQRFIRTKQEINREAILLEPKAVAG
VAGITVKSGIEDFSIIPFEQDAGI

>WP_001107936.1 MULTISPECIES: host-nuclease inhibitor protein Gam [Enterobacteriaceae]>EGI94970.1 host-nuclease inhibitor protein gam [Shigella boydii 5216-82]>CSR34065.1 host-nuclease inhibitor protein [Shigella sonnei]>CSQ65903.1 host-nuclease inhibitor protein [Shigella sonnei]>CSQ94361.1 host-nuclease inhibitor protein [Shigella sonnei]>SJK23465.1 host-nuclease inhibitor protein [Shigella sonnei]>SJB59111.1 host-nuclease inhibitor protein [Shigella sonnei]>SJI55768.1 host-nuclease inhibitor protein [Shigella sonnei]>SJI56601.1 host-nuclease inhibitor protein [Shigella sonnei]>SJJ20109.1 host-nuclease inhibitor protein [Shigella sonnei]>SJJ54643.1 host-nuclease inhibitor protein [Shigella sonnei]>SJI29650.1 host-nuclease inhibitor protein [Shigella sonnei]>SIZ53226.1 host-nuclease inhibitor protein [Shigella sonnei]>SJA65714.1 host-nuclease inhibitor protein [Shigella sonnei]>SJJ21793.1 host-nuclease inhibitor protein [Shigella sonnei]>SJD61405.1 host-nuclease inhibitor protein [Shigella sonnei]>SJJ14326.1 host-nuclease inhibitor protein [Shigella sonnei]>SIZ57861.1 host-nuclease inhibitor protein [Shigella sonnei]>SJD58744.1 host-nuclease inhibitor protein [Shigella sonnei]>SJD84738.1 host-nuclease inhibitor protein [Shigella sonnei]>SJJ51125.1 host-nuclease inhibitor protein [Shigella sonnei]>SJD01353.1 host-nuclease inhibitor protein [Shigella sonnei]>SJE63176.1 host-nuclease inhibitor protein [Shigella sonnei]

(SEQ ID NO: 719)
MAKPAKRIRNAAAAYVPQSRDAVVCDIRRIGDLQREAARLETEMNDAIAE
ITEKYASQIAPLKTSIETLSKGVQGWCEANRDELTNGGKVKTANLVTGDV
SWRQRPPSVSIRGVDAVMETLERLGLQRFIRTKQEINKEAILLEPKAVAG
VAGITVKSGIEDFSIIPFEQDAGI

>WP_050939550.1 host-nuclease inhibitor protein Gam [Escherichia coli]>KNF77791.1 host-nuclease inhibitor protein Gam [Escherichia coli]

(SEQ ID NO: 720)
MAKPAKRIKNAAAAYVPQSRDAVVCDIRRIGDLQREAARLETEMNDAIAE
ITEKYASQIAPLKTSIETLSKGVQGWCEANRDELTNGGKVKTANLVTGDV
SWRLRPPSVSIRGVDAVMETLERLGLQRFICTKQEINKEAILLEPKVVAG
VAGITVKSGIEDFSIIPFEQEAGI

>WP_085334715.1 host-nuclease inhibitor protein Gam [Escherichia coli]>OSC16757.1 host-nuclease inhibitor protein Gam [Escherichia coli]

(SEQ ID NO: 721)
MAKPVKRIRNAAAAYVPQSRDAVVCDIRRIGDLQREAARLETEMNDAIAE
ITEKYASQIAPLKTSIETLSKGIQGWCEANRDELTNGGKVKTANLVTGDV
SWRQRPPSVSIRGVDAVMETLERLGLQRFIRTKQEINKEAILLEPKAVAG
VAGITVKSGIEDFSIIPFEQEAGI

>WP_065226797.1 host-nuclease inhibitor protein Gam [Escherichia coli]>ANO88858.1 host-nuclease inhibitor protein Gam [Escherichia coli]>ANO89006.1 host-nuclease inhibitor protein Gam [Escherichia coli]

(SEQ ID NO: 722)
MAKPAKRIRNAAAAYVPQSRDAVVCDIRWIGDLQREAVRLETEMNDAIAE
ITEKYASRIAPLKTRIETLSKGVQGWCEANRDELTNGGKVKTANLVTGDV
SWRQRPPSVSlRGVDAVMETLERLGLQRFIRTKQEINKEAILLEPKAVAG
VAGITVKSGIEDFSIIPFEQEAGI

>WP_032239699.1 host-nuclease inhibitor protein Gam [Escherichia coli]>KDU26235.1 bacteriophage Mu Gam like family protein [Escherichia coli 3-373-03_S4_C2]>KDU49057.1 bacteriophage Mu Gam like family protein [Escherichia coli 3-373-03_S4_C1]>KEL21581.1 bacteriophage Mu Gam like family protein [Escherichia coli 3-373-03_S4_C3]

(SEQ ID NO: 723)
MAKSAKRIRNAAATYVPQSRDAVVCDIRRIGDLQREAARLETEMNDAIAE
ITEKYASQIAPLKTSIETLSKGIQGWCEANRDELTNGGKVKTANLVTGDV
SWRQRPPSVSIRGVDAVMETLERLGLQRFIRTKQEINKEAILLEPKAVAG
VAGITVKSGIEDFSIIPFEQEAGI

>WP_080172138.1 host-nuclease inhibitor protein Gam [Salmonella enterica]

(SEQ ID NO: 724)
MAKSAKRIKSAAATYVPQSRDAVVCDIRRIGDLQREAARLETEMNDAIAE
ITEKYASQIAPLKTSIETLSKGVQGWCEANRDELTNGGKVKSANLVTGDV
QWRQRPPSVSIRGVDAVMETLERLGLQRFIRTKQEINKEAILLEPKAVAG
VAGITVKSGIEDFSIIPFEQEAGI

>WP_077134654.1 host-nuclease inhibitor protein Gam [Shigella sonnei]>SIZ51898.1 host-nuclease inhibitor protein [Shigella sonnei]>SJK07212.1 host-nuclease inhibitor protein [Shigella sonnei]

(SEQ ID NO: 725)
MAKSAKRIRNAAAAYVPQSRDAVVCDIRRIGNLQREAARLETEMNDAIAE
ITEKYASQIAPLKTSIETLSKGVQGWCEANRDELTNGGKVKTANLVTGDV
SWRQRPPSVSlRGVDAVMETLERLGLQRFIRTKQEINKEAILLEPKAVAG
VAGITVKSGIEDFSIIPFEQDAGI

>WP_000261565.1 host-nuclease inhibitor protein Gam [Shigella flexneri]>EGK20651.1 host-nuclease inhibitor protein gam [Shigella flexneri K-272]>EGK34753.1 host-nuclease inhibitor protein gam [Shigella flexneri K-227]

(SEQ ID NO: 726)
MVVSAIASTPHDAVVCDIRRIGDLQREAARLETEMNDAIAEITEKDASQI
APLKTSIETLSKGVQGWCEANRDELTNGGKVKTANLVTGDVSWRQRPPSV
SIRGVDAVMETLERLGLQRFIRTKQEINKEAILLEPKAVAGVAGITVKSG
IEDFSIIPFEQEAGI

>ASG63807.1 host-nuclease inhibitor protein Gam [Kluyvera georgiana]

(SEQ ID NO: 727)
MVSKPKRIKAAAANYVSQSRDAVITDIRKIGDLQREATRLESAMNDEIAV
ITEKYAGLIKPLKADVEMLSKGVQGWCEANRDDLTSNGKVKTANLVTGDI
QWRIRPPSVSVRGPDAVMETLTRLGLSRFIRTKQEINKEAILNEPLAVAG
VAGITVKSGIEDFSIIPFEQTADI

>WP_078000363.1 host-nuclease inhibitor protein Gam [Edwardsiella tarda]

(SEQ ID NO: 728)
MASKPKRIKSAAANYVSQSRDAVIIDIRKIGDLQREATRLESAMNDEIAV
ITEKYAGLIKPLKADVEMLSKGVQGWCEANRDELTCNGKVKTANLVTGDI
QWRIRPPSVSVRGPDSVMETLLRLGLSRFIRTKQEINKEAILNEPLAVAG
VAGITVKTGVEDFSIIPFEQTADI

>WP_047389411.1 host-nuclease inhibitor protein Gam [Citrobacter freundii]>KGY86764.1 host-nuclease inhibitor protein Gam [Citrobacter freundii]>OIZ37450.1 host-nuclease inhibitor protein Gam [Citrobacter freundii]

(SEQ ID NO: 729)
MVSKPKRIKAAAANYVSQSKEAVIADIRKIGDLQREATRLESAMNDEIAV
ITEKYAGLIKPLKTDVEILSKGVQGWCEANRDELTSNGKVKTANLVTGDI
QWRIRPPSVAVRGPDAVMETLLRLGLSRHRTKQEINKEAILNEPLAVAGV
AGITVKSGVEDFSIIPFEQTADI

>WP_058215121.1 host-nuclease inhibitor protein Gam [Salmonella enterica]>KSU39322.1 host-nuclease inhibitor protein Gam [Salmonella enterica subsp. enterica]>OHJ24376.1 host-nuclease inhibitor protein Gam [Salmonella enterica]>ASG15950.1 host-nuclease inhibitor protein Gam [Salmonella enterica subsp. enterica serovar Macclesfield str. S-1643]

(SEQ ID NO: 730)
MASKPKRIKAAAALYVSQSREDVVRDIRMIGDFQREIVRLETEMNDQIAA
VTLKYADKIKPLQEQLKTLSEGVQNWCEANRSDLTNGGKVKTANLVTGDV
QWRVRPPSVTVRGVDSVMETLRRLGLSRFIRIKEEINKEAILNEPGAVAG
VAGITVKSGVEDFSIIPFEQSATN

>WP_016533308.1 phage host-nuclease inhibitor protein Gam [Pasteurella multocida]>EPE65165.1 phage host-nuclease inhibitor protein Gam [Pasteurella multocida P1933]>ESQ71800.1 host-nuclease inhibitor protein Gam [Pasteurella multocida subsp. multocida P1062]>ODS44103.1 host-nuclease inhibitor protein Gam [Pasteurella multocida]>OPC87246.1 host-nuclease inhibitor protein Gam [Pasteurella multocida subsp. multocida]>OPC98402.1 host-nuclease inhibitor protein Gam [Pasteurella multocida subsp. multocida]

(SEQ ID NO: 731)
MAKKATRIKTTAQVYVPQSREDVASDIKTIGDLNREITRLETEMNDKIAE
ITESYKGQFSPIQERIKNLSTGVQFWAEANRDQITNGGKTKTANLITGEV
SWRVRNPSVKITGVDSVLQNLKIHGLTKFIRVKEEINKEAILNEKHEVAG
IAGIKVVSGVEDFVITPFEQEI

>WP_005577487.1 host-nuclease inhibitor protein Gam [Aggregatibacter actinomycetemconitans]>EHK90561.1 phage host-nuclease inhibitor protein Gam [Aggregatibacter actinomycetencomitans RhAA1]>KNE77613.1 host-nuclease inhibitor protein Gam [Aggregatibacter actinomycetemcomitans RhAA1]

(SEQ ID NO: 732)
MAKSATRVKATAQIYVPQTREDAAGDIKTIGDLNREVARLEAEMNDKIAA
ITEDYKDKFAPLQERIKTLSNGVQYWSEANRDQITNGGKTKTANLVTGEV
SWRVRNPSVKVTGVDSVLQNLRIHGLERFIRTKEEINKEAILNEKSAVAG
IAGIKVITGVEDFVITPFEQEAA

>WP_090412521.1 host-nuclease inhibitor protein Gam [Nitrosomonas halophila]>SDX89267.1 Mu-like prophage host-nuclease inhibitor protein Gam [Nitrosomonas halophila]

(SEQ ID NO: 733)
MARNAARLKTKSIAYVPQSRDDAAADIRKIGDLQRQLTRTSTEMNDAIAA
ITQNFQPRMDAIKEQINLLQAGVQGYCEAHRHALTDNGRVKTANLITGEV
QWRQRPPSVSIRGQQVVLETLRRLGLERFIRTKEEVNKEAILNEPDEVRG
VAGLNVITGVEDFVITPFEQEQP

>WP_077926574.1 host-nuclease inhibitor protein Gam [Wohlfahrtiimonas larvae]

(SEQ ID NO: 734)
MAKKRIKAAATVYVPQSKEEVQNDIREIGDISRKNERLETEMNDRIAEIT
NEYAPKFEVNKVRLELLTKGVQSWCEANRDDLTNSGKVKSANLVTGKVEW
RQRPPSISVKGMDAVIEWLQDSKYQRFLRTKVEVNKEAMLNEPEDAKTIP
GITIKSGIEDFAITPFEQEAGV

### Deaminase Domains

[0196] In some embodiments, the nucleobase editor useful in the present disclosure comprises: (i) a guide nucleotide sequence-programmable DNA-binding protein domain; and (ii) a deaminase domain. In certain embodiments, the deaminase domain of the fusion protein is a cytosine deaminase. In some embodiments, the deaminase is an APOBEC1 deaminase. In some embodiments, the deaminase is a rat APOBEC1. In some embodiments, the deaminase is a human APOBEC1. In some embodiments, the deaminase is an APOBEC2 deaminase. In some embodiments, the deaminase is an APOBEC3A deaminase. In some embodiments, the deaminase is an APOBEC3B deaminase. In some embodiments, the deaminase is an APOBEC3C deaminase. In some embodiments, the deaminase is an APOBEC3D deaminase. In some embodiments, is an APOBEC3F deaminase. In some embodiments, the deaminase is an APOBEC3G deaminase. In some embodiments, the deaminase is an APOBEC3H deaminase. In some embodiments, the deaminase is an APOBEC4 deaminase. In some embodiments, the deaminase is an activation-induced deaminase (AID). In some embodiments, the deaminase is a Lamprey CDA1 (pmCDA1). In some embodiments, the deaminase is a human APOBEC3G or a functional fragment thereof. In some embodiments, the deaminase is an APOBEC3G variant comprising mutations correspond to the D316R/D317R mutations in the human APOBEC3G. Exemplary, non-limiting cytosine deaminase sequences that may be used in accordance with the methods of the present disclosure are provided in Example 1 below.

[0197] In some embodiments, the cytosine deaminase is a wild type deaminase or a deaminase as set forth in SEQ ID NOs: 1-260, 270-292, 315-323, 680, or 682. In some embodiments, the cytosine deaminase domains of the fusion proteins provided herein include fragments of deaminases and proteins homologous to either a deaminase or a deaminase fragment. For example, in some embodiments, a deaminase domain may comprise a fragment of the amino acid sequence set forth in any of SEQ ID NOs: 1-260, 270-292, 315-323, 680, or 682. In some embodiments, a deaminase domain comprises an amino acid sequence homologous to the amino acid sequence set forth in any of SEQ ID NOs: 1-260, 270-292, 315-323, 680, or 682, or an amino acid sequence homologous to a fragment of the amino acid sequence set forth in any of SEQ ID NOs: 1-260, 270-292, 315-323, 680, or 682. In some embodiments, proteins comprising a deaminase, a fragment of a deaminase, or a homolog of a deaminase are referred to as “deaminase variants.” A deaminase variant shares homology to a deaminase, or a fragment thereof. For example a deaminase variant is at least about 70% identical, at least about 80% identical, at least about 90% identical, at least about 95% identical, at least about 96% identical, at least about 97% identical, at least about 98% identical, at least about 99% identical, at least about 99.5% identical, or at least about 99.9% identical to a wild type deaminase or a deaminase as set forth in any of SEQ ID NOs: 1-260, 270-292, or 315-323. In some embodiments, the deaminase variant comprises a fragment of the deaminase, such that the fragment is at least about 70% identical, at least about 80% identical, at least about 90% identical, at least about 95% identical, at least about 96% identical, at least about 97% identical, at least about 98% identical, at least about 99% identical, at least about 99.5% identical, or at least about 99.9% identical to the corresponding fragment of wild type deaminase or a deaminase as set forth in any of SEQ ID NOs: 1-260, 270-292, 315-323, 680, or 682. In some embodiments, the cytosine deaminase is at least at least about 70% identical, at least about 80% identical, at least about 90% identical, at least about 95% identical, at least about 96% identical, at least about 97% identical, at least about 98% identical, at least about 99% identical, at least about 99.5% identical, or at least about 99.9% identical to an APOBEC3G variant as set forth in SEQ ID NO: 291 or SEQ ID NO: 292, and comprises mutations corresponding to the D316F/D317R mutations in SEQ ID NO: 290.

[0198] In some embodiments, the cytosine deaminase domain is fused to the N-terminus of the guide nucleotide sequence-programmable DNA-binding protein domain. For example, the fusion protein may have an architecture of NH₂-[cytosine deaminase]-[guide nucleotide sequence-programmable DNA-binding protein domain]-COOH. The “−” used in the general architecture above indicates the presence of an optional linker. The term “linker,” as used herein, refers to a chemical group or a molecule linking two molecules or moieties, e.g., two domains of a fusion protein, such as, for example, a dCas9 domain and a cytosine deaminase domain. Typically, the linker is positioned between, or flanked by, two groups, molecules, or other moieties and connected to each one via a covalent bond, thus connecting the two. In some embodiments, the linker is an amino acid or a plurality of amino acids (e.g., a peptide or protein). In some embodiments, the linker is an organic molecule, group, polymer, or chemical moiety. In some embodiments, the linker is 5-100 amino acids in length, for example, 5, 6, 7, 8, 9, 10, 11, 12, 13, 14, 15, 16, 17, 18, 19, 20, 21, 22, 23, 24, 25, 26, 27, 28, 29, 30, 30-35, 35-40, 40-45, 45-50, 50-60, 60-70, 70-80, 80-90, 90-100, 100-150, or 150-200 amino acids in length. Longer or shorter linkers are also contemplated. Linkers may be of any form known in the art. For example, the linker may be a linker from a website, such as www[dot]ibi[dot]vu[dot]nl/programs/linkerdbwww/ or from www[dot]ibi[dot]vu[dot]nl/programs/linkerdbwww/src/database.txt. The linkers may also be unstructured, structured, helical, or extended.

[0199] In some embodiments, the cytosine deaminase domain and the Cas9 domain are fused to each other via a linker. Various linker lengths and flexibilities between the deaminase domain (e.g., APOBEC1) and the Cas9 domain can be employed (e.g., ranging from flexible linkers of the form (GGGS)ₙ (SEQ ID NO: 303). (GGGGS)ₙ (SEQ ID NO: 304), (GGS)ₙ, and (G)ₙ to more rigid linkers of the form (EAAAK)ₙ (SEQ ID NO: 305, SGSETPGTSESATPES (SEQ ID NO: 306) (see. e.g., Guilinger et al., Nat. Biotechnol. 2014; 32(6): 577-82; the entire contents of which is incorporated herein by reference), (XP)ₙ, or a combination of any of these, wherein X is any amino acid, and n is independently an integer between 1 and 30, in order to achieve the optimal length for deaminase activity for the specific application. In some embodiments, n is independently 1, 2, 3, 4, 5, 6, 7, 8, 9, 10, 11, 12, 13, 14, 15, 16, 17, 18, 19, 20, 21, 22, 23, 24, 25, 26, 27, 28, 29, or 30, or, if more than one linker or more than one linker motif is present, any combination thereof. In some embodiments, the linker comprises a (GGS), motif, wherein n is 1, 2, 3, 4, 5, 6, 7, 8, 9, 10, 11, 12, 13, 14 or 15. In some embodiments, the linker comprises a (GGS)ₙ motif, wherein n is 1, 3, or 7. In some embodiments, the linker comprises the amino acid sequence SGSETPGTSESATPES (SEQ ID NO: 306), also referred to as the XTEN linker. In some embodiments, the linker comprises an amino acid sequence chosen from the group including, but not limited to, AGVF (SEQ ID NO: 307), GFLG (SEQ ID NO: 308), FK, AL, ALAL (SEQ ID NO: 349), and ALALA (SEQ ID NO: 309). In some embodiments, suitable linker motifs and configurations include those described in Chen et al., Fusion protein linkers: property, design and functionality. Adv Drug Deliv Rev. 2013; 65(10):1357-69, which is incorporated herein by reference. In some embodiments, the linker may comprise any of the following amino acid sequences: VPFLLEPDNINGKTC (SEQ ID NO: 350), GSAGSAAGSGEF (SEQ ID NO: 351), SIVAQLSRPDPA (SEQ ID NO: 352), MKIIEQLPSA (SEQ ID NO: 353), VRHKLKRVGS (SEQ ID NO: 354), GHGTGSTGSGSS (SEQ ID NO: 355), MSRPDPA (SEQ ID NO: 356), GSAGSAAGSGEF (SEQ ID NO: 357), SGSETPGTSESA (SEQ ID NO: 358), SGSETPGTSESATPEGGSGGS (SEQ ID NO: 359), and GGSM (SEQ ID NO: 360). Additional suitable linker sequences will be apparent to those of skill in the art based on the instant disclosure.

[0200] To successfully edit the desired target C base, the linker between Cas9 and APOBEC may be optimized, as described in Komor et al., Nature, 533, 420-424 (2016), which is incorporated herein by reference. The numbering scheme for base editing is based on the predicted location of the target C within the single stranded stretch of DNA (R-loop) displaced by a programmable guide RNA sequence occurring when a DNA-binding domain (e.g, Cas9, nCas9, dCas9) binds a genomic site (see FIG. 4). Conveniently, the sequence immediately surrounding the target C also matches the sequence of the guide RNA, which may be used as a reference as done in the Tables herein. The numbering scheme for base editing is based on a standard 20-mer programmable sequence, and defines position “21” as the first DNA base of the PAM sequence, resulting in position “1” assigned to the first DNA base matching the 5′-end of the 20-mer programmable guide RNA sequence. Therefore, for all Cas9 variants, position “21” is defined as the first base of the PAM sequence (e.g. NGG. NGAN. NGNG, NGAG, NGCG, NNGRRT. NGRRN. NNNRRT. NNNGATT. NNAGAA, NAAAC). When a longer programmable guide RNA sequence is used (e.g. 21-mer) the 5′-end bases are assigned a decreasing negative number starting at “−1”. For other DNA-binding domains that differ in the position of the PAM sequence, or that require no PAM sequence, the programmable guide RNA sequence is used as a reference for numbering. A 3-aa linker gives a 2-5 base editing window (e.g., positions 2, 3, 4, or 5 relative to the PAM sequence in positions 20-23). A 9-aa linker gives a 3-6 base editing window (e.g., positions 3, 4, 5, or 6 relative to the PAM sequence at position 21). A 16-aa linker (e.g., the SGSETPGTSESATPES (SEQ ID NO: 306) linker) gives a 4-7 base editing window (e.g., positions 4, 5, 6, or 7 relative to the PAM sequence at position 21). A 21-aa linker gives a 5-8 base editing window (e.g., positions 5, 6, 7, 8 relative to the PAM sequence at position 21). Each of these windows can be useful for editing different targeted C bases. For example, the targeted C bases may be at different distances from the adjacent PAM sequence, and by varying the linker length, the precise editing of the desired C base is ensured. One skilled in the art, based on the teachings of CRISPR/Cas9 technology, in particular the teachings of U.S. Provisional Applications 62/245,828, 62/279,346, 62/311,763, 62/322,178, 62/357,352, 62/370,700, and 62/398,490, and in Komor et al., Nature, “Programmable editing of a target base in genomic DNA without double-stranded DNA cleavage,” 533, 420-424 (2016), each of which is incorporated herein by reference, will be able to determine the editing window for his/her purpose, and properly design the linker of the cytosine deaminase-dCas9 protein for the precise targeting of the desired C base. To successfully edit the desired target C base, the sequence identity of the homolog of Cas9 attached to APOBEC may be optimized based on the teachings of CRISPR/Cas9 technology. As a non-limiting example, the teachings of any of the following documents may be used: U.S. Provisional Application Nos. 62/245,828, 62/279,346, 62/311,763, 62/322,178, 62/357,352, 62/370,700, and 62/398,490, and Komor et al., Nature, 533, 420-424 (2016), each of which is incorporated herein by reference in its entirety. APOBEC1-XTEN-SaCas9n-UGI gives a 1-12 base editing window (e.g., positions 1, 2, 3, 4, 5, 6, 7, 8, 9, 10, 11, or 12 relative to the NNNRRT PAM sequence in positions 20-26). One skilled in the art, based on the teachings of CRISPR/Cas9 technology, will be able to determine the editing window for his/her purpose, and properly determine the required Cas9 homolog and linker attached to the cytosine deaminase for the precise targeting of the desired C base.

[0201] In some embodiments, the fusion protein useful in the present disclosure further comprises a uracil glycosylase inhibitor (UGI) domain. A “uracil glycosylase inhibitor” refers to a protein that inhibits the activity of uracil-DNA glycosylase. The C to T base change induced by deamination results in a U:G heteroduplex, which triggers a cellular DNA-repair response. Uracil DNA glycosylase (UDG) catalyzes removal of U from DNA in cells and initiates base excision repair, with reversion of the U:G pair to a C:G pair as the most common outcome. Thus, such cellular DNA-repair response may be responsible for the decrease in nucleobase editing efficiency in cells. Uracil DNA Glycosylase Inhibitor (UGI) is known in the art to potently blocks human UDG activity. As described in Komor et al., Nature (2016), fusing a UGI domain to the cytidine deaminase-dCas9 fusion protein reduced the activity of UDG and significantly enhanced editing efficiency.

[0202] Suitable UGI protein and nucleotide sequences are provided herein and additional suitable UGI sequences are known to those in the art, and include, for example, those published in Wang et al., Uracil-DNA glycosylase inhibitor gene of bacteriophage PBS2 encodes a binding protein specific for uracil-DNA glycosylase. J. Biol. Chem. 264:1163-1171(1989); Lundquist et al., Site-directed mutagenesis and characterization of uracil-DNA glycosylase inhibitor protein. Role of specific carboxylic amino acids in complex formation with Escherichia coli uracil-DNA glycosylase. J. Biol. Chem. 272:21408-21419(1997); Ravishankar et al., X-ray analysis of a complex of Escherichia coli uracil DNA glycosylase (EcUDG) with a proteinaceous inhibitor. The structure elucidation of a prokaryotic UDG. Nucleic Acids Res. 26:4880-4887(1998); and Putnam et al., Protein mimicry of DNA from crystal structures of the uracil-DNA glycosylase inhibitor protein and its complex with Escherichia coli uracil-DNA glycosylase. J. Mol. Biol. 287:331-346(1999), each of which is incorporated herein by reference. In some embodiments, the UGI comprises the following amino acid sequence:

### Bacillus Phage PBS2 (Bacteriophage PBS2) Uracil-DNA Glycosylase Inhibitor

(SEQ ID NO: 361)
MTNLSDIIEKETGKQLVIQESILMLPEEVEEVIGNKPESDILVHTAYDES
TDENVMLLTSDAPEYKPWALVIQDSNGENKIKML

[0204] In some embodiments, the UGI protein comprises a wild type UGI or a UGI as set forth in SEQ ID NO: 361. In some embodiments, the UGI proteins useful in the present disclosure include fragments of UGI and proteins homologous to a UGI or a UGI fragment. For example, in some embodiments, a UGI comprises a fragment of the amino acid sequence set forth in SEQ ID NO: 361. In some embodiments, a UGI comprises an amino acid sequence homologous to the amino acid sequence set forth in SEQ ID NO: 361 or an amino acid sequence homologous to a fragment of the amino acid sequence set forth in SEQ ID NO: 361. In some embodiments, proteins comprising UGI or fragments of UGI or homologs of either UGI or UGI fragments are referred to as “UGI variants.” A UGI variant shares homology with UGI, or a fragment thereof. For example, a UGI variant is at least about 70% identical, at least about 80% identical, at least about 85% identical, at least about 90% identical, at least about 95% identical, at least about 96% identical, at least about 97% identical, at least about 98% identical, at least about 99% identical, at least about 99.5% identical, or at least about 99.9% identical to a wild type UGI or a UGI as set forth in SEQ ID NO: 361. In some embodiments, the UGI variant comprises a fragment of UGI, such that the fragment is at least about 70% identical, at least about 80% identical, at least about 90% identical, at least about 95% identical, at least about 96% identical, at least about 97% identical, at least about 98% identical, at least about 99% identical, at least about 99.5% identical, or at least about 99.9% identical to the corresponding fragment of wild type UGI or a UGI as set forth in SEQ ID NO: 361.

[0205] It should be appreciated that additional proteins may be uracil glycosylase inhibitors. For example, other proteins that are capable of inhibiting (e.g., sterically blocking) a uracil-DNA glycosylase base-excision repair enzyme are within the scope of this disclosure. In some embodiments, a uracil glycosylase inhibitor is a protein that binds DNA. In some embodiments, a uracil glycosylase inhibitor is a protein that binds single-stranded DNA. For example, a uracil glycosylase inhibitor may be a Erwinia tasmaniensis single-stranded binding protein. In some embodiments, the single-stranded binding protein comprises the amino acid sequence (SEQ ID NO: 362). In some embodiments, a uracil glycosylase inhibitor is a protein that binds uracil. In some embodiments, a uracil glycosylase inhibitor is a protein that binds uracil in DNA. In some embodiments, a uracil glycosylase inhibitor is a catalytically inactive uracil DNA-glycosylase protein. In some embodiments, a uracil glycosylase inhibitor is a catalytically inactive uracil DNA-glycosylase protein that does not excise uracil from the DNA. For example, a uracil glycosylase inhibitor is a UdgX. In some embodiments, the UdgX comprises the amino acid sequence (SEQ ID NO: 363). As another example, a uracil glycosylase inhibitor is a catalytically inactive UDG. In some embodiments, a catalytically inactive UDG comprises the amino acid sequence (SEQ ID NO: 364). It should be appreciated that other uracil glycosylase inhibitors would be apparent to the skilled artisan and are within the scope of this disclosure. In some embodiments, the fusion protein comprises a guide nucleotide sequence-programmable DNA-binding protein, a cytidine deaminase domain, a Gam protein, and a UGI domain. In some embodiments, any of the fusion proteins provided herein that comprise a guide nucleotide sequence-programmable DNA-binding protein (e.g., a Cas9 domain), a cytidine deaminase, and a Gam protein may be further fused to a UGI domain either directly or via a linker. This disclosure also contemplates a fusion protein comprising a Cas9 nickase-nucleic acid editing domain fused to a cytidine deaminase and a Gam protein, which is further fused to a UGI domain.

Erwinia tasmaniensis SSB (Themostable Single-Stranded DNA Binding Protein)

(SEQ ID NO: 362)
MASRGVNKVILVGNLGQDPEVRYMPNGGAVANITLATSESWRDKQTGETK
EKTEWHRVVLFGKLAEVAGEYLRKGSQVYIEGALQTRKWTDQAGVEKYTT
EVVVNVGGTMQMLGGRSQGGGASAGGQNGGSNNGWGQPQQPQGGNQFSGG
AQQQARPQQQPQQNNAPANNEPPIDFDDDIP

UdgX (Binds to Uracil in DNA but does not Excise)

(SEQ ID NO: 363)
MAGAQDFVPHTADLAELAAAAGECRGCGLYRDATQAVFGAGGRSARIMMI
GEQPGDKEDLAGLPFVGPAGRLLDRALEAADIDRDALYVTNAVKHFKFTR
AAGGKRRIHKTPSRTEVVACRPWLIAEMTSVEPDVVVLLGATAAKALLGN
DFRVTQHRGEVLHVDDVPGDPALVATVHPSSLLRGPKEERESAFAGLVDD
LRVAADVRP

UDG (Catalytically Inactive Human UDG, Binds to Uracil in DNA but does not Excise)

(SEQ ID NO: 364)
MIGQKTLYSFFSPSPARKRHAPSPEPAVQGTGVAGVPEESGDAAAIPAKK
APAGQEEPGTPPSSPLSAEQLDRIQRNKAAALLRLAARNVPVGFGESWKK
HLSGEFGKPYFIKLMGFVAEERKHYTVYPPPHQVFTWTQMCDIKDVKVVI
LGQEPYHGPNQAHGLCFSVQRPVPPPPSLENIYKELSTDIEDFVHPGHGD
LSGWAKQGVLLLNAVLTVRAHQANSHKERGWEQFTDAVVSWLNQNSNGLV
FLLWGSYAQKKGSAIDRKRHHVLQTAHPSPLSVYRGFFGCRHFSKTNELL
QKSGKKPIDWKEL

[0206] In some embodiments, the UGI domain is fused to the C-terminus of the dCas9 domain in the fusion protein. Thus, the fusion protein would have an architecture of NH₂-[cytosine deaminase]-[guide nucleotide sequence-programmable DNA-binding protein domain]-[UGI]-COOH. In some embodiments, the UGI domain is fused to the N-terminus of the cytosine deaminase domain. As such, the fusion protein would have an architecture of NH₂-[UGI]-[cytosine deaminase]-[guide nucleotide sequence-programmable DNA-binding protein domain]-COOH. In some embodiments, the UGI domain is fused between the guide nucleotide sequence-programmable DNA-binding protein domain and the cytosine deaminase domain. As such, the fusion protein would have an architecture of NH₂-[cytosine deaminase]-[UGI]-[guide nucleotide sequence-programmable DNA-binding protein domain]-COOH. The linker sequences described herein may also be used for the fusion of the UGI domain to the cytosine deaminase-dCas9 fusion proteins.

[0207] In some embodiments, the fusion protein comprises the structure:
[0208] [cytosine deaminase]-[optional linker sequence]-[guide nucleotide sequence-programmable DNA binding protein]-[optional linker sequence]-[UGI];
[0209] [cytosine deaminase]-[optional linker sequence]-[UGI]-[optional linker sequence]-[guide nucleotide sequence-programmable DNA binding protein];
[0210] [UGI]-[optional linker sequence]-[cytosine deaminase]-[optional linker sequence]-[guide nucleotide sequence-programmable DNA binding protein];
[0211] [UGI]-[optional linker sequence]-[guide nucleotide sequence-programmable DNA binding protein]-[optional linker sequence]-[cytosine deaminase];
[0212] [guide nucleotide sequence-programmable DNA binding protein]-[optional linker sequence]-[cytosine deaminase]-[optional linker sequence]-[UGI]; or
[0213] [guide nucleotide sequence-programmable DNA binding protein]-[optional linker sequence]-[UGI]-[optional linker sequence]-[cytosine deaminase].

[0214] In some embodiments, the fusion protein is of the structure:
[0215] [cytosine deaminase]-[optional linker sequence]-[Cas9 nickase]-[optional linker sequence]-[UGI]; [cytosine deaminase]-[optional linker sequence]-[UGI]-[optional linker sequence]-[Cas9 nickase]; [UGI]-[optional linker sequence]-[cytosine deaminase]-[optional linker sequence]-[Cas9 nickase]; [UGI]-[optional linker sequence]-[Cas9 nickase]-[optional linker sequence]-[cytosine deaminase]; [Cas9 nickase]-[optional linker sequence]-[cytosine deaminase]-[optional linker sequence]-[UGI]; or [Cas9 nickase]-[optional linker sequence]-[UGI]-[optional linker sequence]-[cytosine deaminase].

[0216] In some embodiments, fusion proteins provided herein further comprise a nuclear localization sequence (NLS). In some embodiments, the NLS is fused to the N-terminus of the fusion protein. In some embodiments, the NLS is fused to the C-terminus of the fusion protein. In some embodiments, the NLS is fused to the N-terminus of the UGI protein. In some embodiments, the NLS is fused to the C-terminus of the UGI protein. In some embodiments, the NLS is fused to the N-terminus of the guide nucleotide sequence-programmable DNA-binding protein domain. In some embodiments, the NLS is fused to the C-terminus of the guide nucleotide sequence-programmable DNA-binding protein domain. In some embodiments, the NLS is fused to the N-terminus of the cytosine deaminase. In some embodiments, the NLS is fused to the C-terminus of the deaminase. In some embodiments, the NLS is fused to the fusion protein via one or more linkers. In some embodiments, the NLS is fused to the fusion protein without a linker. Non-limiting, exemplary NLS sequences may be PKKKRKV (SEQ ID NO: 365) or MDSLLMNRRKFLYQFKNVRWAKGRRETYLC (SEQ ID NO: 366).

[0217] Some aspects of the present disclosure provide nucleobase editors described herein associated with a guide nucleotide sequence (e.g., a guide RNA or gRNA), gRNAs can exist as a complex of two or more RNAs. or as a single RNA molecule, gRNAs that exist as a single RNA molecule may be referred to as single-guide RNAs (sgRNAs), though “gRNA” is used interchangeably to refer to guide RNAs that exist as either single molecules or as a complex of two or more molecules. Typically, gRNAs that exist as a single RNA species comprise two domains: (1) a domain that shares homology to a target nucleic acid (e.g., and directs binding of the Cas9 complex to the target); and (2) a domain that binds the Cas9 protein. In some embodiments, domain (2) corresponds to a sequence known as a tracrRNA, and comprises a stem-loop structure. For example, in some embodiments, domain (2) is identical or homologous to a tracrRNA as provided in Jinek et al., Science 337:816-821(2012), which is incorporated herein by reference. Other examples of gRNAs (e.g., those including domain 2) can be found in U.S. Provisional Patent Application, U.S. Ser. No. 61/874,682, filed Sep. 6, 2013, entitled “Switchable Cas9 Nucleases And Uses Thereof,” and U.S. Provisional Patent Application, U.S. Ser. No. 61/874,746, filed Sep. 6, 2013, entitled “Delivery System For Functional Nucleases,” each are hereby incorporated by reference in their entirety. The gRNA comprises a nucleotide sequence that complements a target site, which mediates binding of the nuclease/RNA complex to said target site, providing the sequence specificity of the nuclease:RNA complex. These proteins are able to be targeted, in principle, to any sequence specified by the guide RNA. Methods of using RNA-programmable nucleases, such as Cas9, for site-specific cleavage (e.g., to modify a genome) are known in the art (see e.g., Cong, L. et al. Science 339, 819-823 (2013); Mali, P. et al. Science 339, 823-826 (2013); Hwang, W. Y. et al. Nature Biotechnology 31, 227-229 (2013); Jinek, M. et al. eLife 2, e00471 (2013); Dicarlo, J. E. et al. Nucleic acids research (2013); Jiang, W. et al. Nature Biotechnology 31, 233-239 (2013); the entire contents of each of which are incorporated herein by reference). In particular, examples of guide nucleotide sequences (e.g., sgRNAs) that may be used to target the fusion protein of the present disclosure to its target sequence to deaminate the targeted C bases are described in Komor et al., Nature, 533, 420-424 (2016), which is incorporated herein by reference.

[0218] The specific structure of the guide nucleotide sequences (e.g., sgRNAs) depends on its target sequence and the relative distance of a PAM sequence downstream of the target sequence. One skilled in the art will understand, that no unifying structure of guide nucleotide sequence is given, because the target sequences are different for each and every C targeted to be deaminated.

[0219] However, the present disclosure provides guidance in how to design the guide nucleotide sequence. e.g., an sgRNA, so that one skilled in the art may use such teachings to design these for a target sequence of interest. A gRNA typically comprises a tracrRNA framework allowing for Cas9 binding, and a guide sequence, which confers sequence specificity to fusion proteins disclosed herein to target the CCR5 gene. In some embodiments, the guide RNA comprises a structure 5′-[guide sequence]-tracrRNA-3′. Non-limiting, exemplary tracrRNA sequences are shown in Table 10. The tracrRNA sequence may vary from the presented sequences.

TABLE 10
TracrRNA othologues and sequences

| | | SEQ ID |
|---|---|---|
| Organism | tracrRNA sequence | NO: |
| C. jejuni | AAGAAAUUUAAAAAGGGACUAAAAUAAAGAGUUUGCG | 367 |
| | GGACUCUGCGGGGUUACAAUCCCCUAAAACCGCUUUU | |
| F. novicida | AUCUAAAAUUAUAAAUGUACCAAAUAAUUAAUGCUCU | 368 |
| | GUAAUCAUUUAAAAGUAUUUUGAACGGACCUCUGUUU | |
| | GACACGUCUGAAUAACUAAAA | |
| S. thermophilus2 | UGUAAGGGACGCCUUACACAGUUACUUAAAUCUUGCA | 369 |
| | GAAGCUACAAAGAUAAGGCUUCAUGCCGAAAUCAACA | |
| | CCCUGUCAUUUUAUGGCAGGGUGUUUUCGUUAUUU | |
| M. mobile | UGUAUUUCGAAAUACAGAUGUACAGUUAAGAAUACAU | 370 |
| | AAGAAUGAUACAUCACUAAAAAAAGGCUUUAUGCCGU | |
| | AACUACUACUUAUUUUCAAAAUAAGUAGUUUUUUUU | |
| L. innocua | AUUGUUAGUAUUCAAAAUAACAUAGCAAGUUAAAAUA | 371 |
| | AGGCUUUGUCCGUUAUCAACUUUUAAUUAAGUAGCGC | |
| | UGUUUCGGCGCUUUUUUU | |
| S. pyogenes | GUUGGAACCAUUCAAAACAGCAUAGCAAGUUAAAAUA | 372 |
| | AGGCUAGUCCGUUAUCAACUUGAAAAAGUGGCACCGA | |
| | GUCGGUGCUUUUUUU | |
| S. mutans | GUUGGAAUCAUUCGAAACAACACAGCAAGUUAAAAUA | 373 |
| | AGGCAGUGAUUUUUAAUCCAGUCCGUACACAACUUGA | |
| | AAAAGUGCGCACCGAUUCGGUGCUUUUUUAUUU | |
| S. thermophilus | UUGUGGUUUGAAACCAUUCGAAACAACACAGCGAGUU | 374 |
| | AAAAUAAGGCUUAGUCCGUACUCAACUUGAAAAGGUG | |
| | GCACCGAUUCGGUGUUUUUUUU | |
| N. meningitidis | ACAUAUUGUCGCACUGCGAAAUGAGAACCGUUGCUAC | 375 |
| | AAUAAGGCCGUCUGAAAAGAUGUGCCGCAACGCUCUG | |
| | CCCCUUAAAGCUUCUGCUUUAAGGGGCA | |
| P. multocida | GCAUAUUGUUGCACUGCGAAAUGAGAGACGUUGCUAC | 376 |
| | AAUAAGGCUUCUGAAAAGAAUGACCGUAACGCUCUGC | |
| | CCCUUGUGAUUCUUAAUUGCAAGGGGCAUCGUUUUU | |
| S. pyogenes | GUUUAAGAGCUAUGCUGGAAAGCCACGGUGAAAAAGU | 377 |
| | UCAACUAUUGCCUGAUCGGAAUAAAUUUGAACGAUAC | |
| | GACAGUCGGUGCUUUUUUU | |
| S. pyogenes | GUUUAAGAGCUAGAAAUAGCAAGUUUAAAUAAGGCUA | 378 |
| | GUCCGUUAUCAACUUGAAAAAGUGGCACCGAGUCGGU | |
| | GCUUUUUU | |
| S. thermophilus | GUUUUUGUACUCUCAAGAUUCAAUAAUCUUGCAGAAG | 379 |
| CRISPR1 | CUACAAAGAUAAGGCUUCAUGCCGAAAUCAACACCCU | |
| | GUCAUUUUAUGGCAGGGUGUUUU | |
| S. thermophilus | GUUUUAGAGCUGUGUUGUUUGUUAAAACAACACAGCG | 380 |
| CRISPR3 | AGUUAAAAUAAGGCUUAGUCCGUACUCAACUUGAAAA | |
| | GGUGGCACCGAUUCGGUGUUUUU | |

[0220] The guide sequence of the gRNA comprises a sequence that is complementary to the target sequence. The guide sequence is typically about 20 nucleotides long. For example, the guide sequence may be 15-25 nucleotides long. In some embodiments, the guide sequence is 15, 16, 17, 18, 19, 20, 21, 22, 23, 24, or 25 nucleotides long. In some embodiments, the guide sequence is more than 25 nucleotides long. Such suitable guide RNA sequences typically comprise guide sequences that are complementary to a nucleic sequence within 50 nucleotides upstream or downstream of the target nucleotide to be edited.

[0221] In some embodiments, the guide RNA is about 15-100 nucleotides long and comprises a sequence of at least 10 contiguous nucleotides that is complementary to a target sequence. In some embodiments, the guide RNA is 15, 16, 17, 18, 19, 20, 21, 22, 23, 24, 25, 26, 27, 28, 29, 30, 31, 32, 33, 34, 35, 36, 37, 38, 39, 40, 41, 42, 43, 44, 45, 46, 47, 48, 49, or 50 nucleotides long. In some embodiments, the guide RNA comprises a sequence of 15, 16, 17, 18, 19, 20, 21, 22, 23, 24, 25, 26, 27, 28, 29, 30, 31, 32, 33, 34, 35, 36, 37, 38, 39, or 40 contiguous nucleotides that is complementary to a target sequence.

### Compositions

[0222] Aspects of the present disclosure relate to compositions that may be used for editing CCR5-encoding polynucleotides, CCR2-encoding polynucleotides, or both CCR5-encoding polynucleotides and CCR2-encoding polynucleotides. In some embodiments, the editing is carried out in vitro. In some embodiments, the editing is carried out in a cultured cell. In some embodiments, the editing is carried out in vivo. In some embodiments, the editing is carried out in a mammal. In some embodiments, the mammal is a human. In some embodiments, the mammal may be a rodent. In some embodiments, the editing is carried out ex vivo.

[0223] In some embodiments, the composition comprises: (i) a fusion protein comprising: (a) a guide nucleotide sequence-programmable DNA binding protein domain; and (b) a cytosine deaminase domain; and (ii) a guide nucleotide sequence targeting the fusion protein of (i) to a polynucleotide encoding a C-C chemokine receptor type 5 (CCR5) protein.

[0224] In some embodiments, the composition comprises: (i) a fusion protein comprising: (a) a guide nucleotide sequence-programmable DNA binding protein domain; and (b) a cytosine deaminase domain; (ii) a guide nucleotide sequence targeting the fusion protein of (i) to a polynucleotide encoding a C-C chemokine receptor type 2 (CCR2) protein.

[0225] In some embodiments, the composition comprises: (i) a fusion protein comprising: (a) a guide nucleotide sequence-programmable DNA binding protein domain; and (b) a cytosine deaminase domain; (ii) a guide nucleotide sequence targeting the fusion protein of (i) to a polynucleotide encoding a C-C chemokine receptor type 5 (CCR5) protein; (iii) a guide nucleotide sequence targeting the fusion protein of (i) to a polynucleotide encoding a C-C chemokine receptor type 2 (CCR2) protein.

[0226] The guide nucleotide sequence used in the compositions described herein for editing the CCR5-encoding polynucleotide is selected from SEQ ID NOs: 381-657. In some embodiments, the composition comprises a nucleic acid encoding a fusion protein described herein and a guide nucleotide sequence described herein. In some embodiments, the composition described herein further comprises a pharmaceutically acceptable carrier. In some embodiments, the nucleobase editor (i.e., the fusion protein) and the gRNA are provided in two different compositions.

[0227] As used here, the term “pharmaceutically-acceptable carrier” means a pharmaceutically-acceptable material, composition or vehicle, such as a liquid or solid filler, diluent, excipient, manufacturing aid (e.g., lubricant, talc magnesium, calcium or zinc stearate, or steric acid), or solvent encapsulating material, involved in carrying or transporting the compound from one site (e.g., the delivery site) of the body to another site (e.g., organ, tissue or portion of the body). A pharmaceutically acceptable carrier is “acceptable” in the sense of being compatible with the other ingredients of the formulation and not injurious to the tissue of the subject (e.g., physiologically compatible, sterile, having physiologic pH, etc.). Some examples of materials which can serve as pharmaceutically-acceptable carriers include: (1) sugars, such as lactose, glucose and sucrose; (2) starches, such as corn starch and potato starch; (3) cellulose, and its derivatives, such as sodium carboxymethyl cellulose, methylcellulose, ethyl cellulose, microcrystalline cellulose, and cellulose acetate; (4) powdered tragacanth; (5) malt; (6) gelatin; (7) lubricating agents, such as magnesium stearate, sodium lauryl sulfate, and talc; (8) excipients, such as cocoa butter and suppository waxes; (9) oils, such as peanut oil, cottonseed oil, safflower oil, sesame oil, olive oil, corn oil, and soybean oil; (10) glycols, such as propylene glycol; (11) polyols, such as glycerin, sorbitol, mannitol, and polyethylene glycol (PEG); (12) esters, such as ethyl oleate and ethyl laurate; (13) agar; (14) buffering agents, such as magnesium hydroxide and aluminum hydroxide; (15) alginic acid; (16) pyrogen-free water; (17) isotonic saline; (18) Ringer's solution; (19) ethyl alcohol; (20) pH buffered solutions; (21) polyesters, polycarbonates and/or polyanhydrides; (22) bulking agents, such as polypeptides and amino acids (23) serum component, such as serum albumin, HDL and LDL; (22) C₂-C₁₂ alcohols, such as ethanol; and (23) other non-toxic compatible substances employed in pharmaceutical formulations. Wetting agents, coloring agents, release agents, coating agents, sweetening agents, flavoring agents, perfuming agents, preservatives, and antioxidants can also be present in the formulation. The terms such as “excipient,” “carrier,” “pharmaceutically acceptable carrier.” or the like are used interchangeably herein.

[0228] In some embodiments, the nucleobase editors and the guide nucleotides in a composition of the present disclosure are administered by injection, by means of a catheter, by means of a suppository, or by means of an implant, the implant being of a porous, non-porous, or gelatinous material, including a membrane, such as a sialastic membrane, or a fiber. In some embodiments, the nucleobase editors and the guide nucleotides in a composition of the present disclosure are administered by injection into the bloodstream.

[0229] In other embodiments, the nucleobase editors and the guide nucleotides are delivered in a controlled release system. In one embodiment, a pump may be used (see, e.g., Langer, 1990. Science 249:1527-1533; Sefton. 1989, CRC Crit. Ref. Biomed. Eng. 14:201; Buchwald et al., 1980, Surgery 88:507; Saudek et al., 1989, N. Engl. J. Med. 321:574, the entire contents of each of which are incorporated herein by reference). In another embodiment, polymeric materials can be used (See, e.g., Medical Applications of Controlled Release (Langer and Wise eds., CRC Press. Boca Raton, Fla., 1974); Controlled Drug Bioavailability. Drug Product Design and Performance (Smolen and Ball eds., Wiley, New York, 1984); Ranger and Peppas, 1983, Macromol. Sci. Rev. Macromol. Chem. 23:61; See also: Levy et al., 1985. Science 228:190; During et al., 1989, Ann. Neurol. 25:351; Howard et al., 1989, J. Neurosurg. 71:105, each of which is incorporated herein by reference). Other controlled release systems are discussed, for example, in Langer, supra.

[0230] In typical embodiments, the pharmaceutical composition is formulated in accordance with routine procedures as a pharmaceutical composition adapted for intravenous or subcutaneous administration to a subject, e.g., a human. Typically, compositions for administration by injection are solutions in sterile isotonic aqueous buffer. Where necessary, the pharmaceutical can also include a solubilizing agent and a local anesthetic such as lignocaine to ease pain at the site of the injection. Generally, the ingredients are supplied either separately or mixed together in a unit dosage form, for example, as a dry lyophilized powder or water free concentrate in a hermetically sealed container such as an ampoule or sachette indicating the quantity of active agent. Where the pharmaceutical is to be administered by infusion, it can be dispensed with an infusion bottle containing sterile pharmaceutical grade water or saline. Where the pharmaceutical is administered by injection, an ampoule of sterile water for injection or saline can be provided so that the ingredients can be mixed prior to administration.

[0231] A pharmaceutical composition for systemic administration may be a liquid. e.g., sterile saline, lactated Ringer's or Hank's solution. In addition, the pharmaceutical composition can be in solid forms and re-dissolved or suspended immediately prior to use. Lyophilized forms are also contemplated.

[0232] The pharmaceutical composition can be contained within a lipid particle or vesicle, such as a liposome or microcrystal, which is also suitable for parenteral administration. The particles can be of any suitable structure, such as unilamellar or plurilamellar, so long as compositions are contained therein. Compounds can be entrapped in ‘stabilized plasmid-lipid particles’ (SPLP) containing the fusogenic lipid dioleoylphosphatidylethanolamine (DOPE), low levels (5-10 mol %) of cationic lipid, and stabilized by a polyethyleneglycol (PEG) coating (Zhang Y. P. et al., Gene Ther. 1999, 6:1438-47, the entire contents of which is incorporated herein by reference). Positively charged lipids such as N-[1-(2,3-dioleoyloxi)propyl]-N,N,N-trimethyl-amoniummethylsulfate, or “DOTAP;” are particularly preferred for such particles and vesicles. The preparation of such lipid particles is well known. See. e.g., U.S. Pat. Nos. 4,880,635; 4,906,477; 4,911,928; 4,917,951; 4,920,016; and 4,921,757, each of which is incorporated herein by reference.

[0233] The pharmaceutical compositions of this disclosure may be administered or packaged as a unit dose, for example. The term “unit dose” when used in reference to a pharmaceutical composition of the present disclosure refers to physically discrete units suitable as unitary dosage for the subject, each unit containing a predetermined quantity of active material calculated to produce the desired therapeutic effect in association with the required diluent; i.e., carrier, or vehicle.

[0234] In some embodiments, the nucleobase editors or the guide nucleotides described herein may be conjugated to a therapeutic moiety, e.g., an anti-inflammatory agent. Techniques for conjugating such therapeutic moieties to polypeptides, including e.g., Fc domains, are well known; see. e.g., Amon et al., “Monoclonal Antibodies For Immunotargeting Of Drugs In Cancer Therapy”, in Monoclonal Antibodies And Cancer Therapy. Reisfeld et al. (eds.), 1985, pp. 243-56, Alan R. Liss. Inc.); Hellstrom et al., “Antibodies For Drug Delivery”, in Controlled Drug Delivery (2nd Ed.), Robinson et al. (eds.), 1987. pp. 623-53, Marcel Dekker. Inc.); Thorpe. “Antibody Carriers Of Cytotoxic Agents In Cancer Therapy: A Review”, in Monoclonal Antibodies '84: Biological And Clinical Applications, Pinchera et al. (eds.), 1985. pp. 475-506); “Analysis, Results, And Future Prospective Of The Therapeutic Use Of Radiolabeled Antibody In Cancer Therapy”, in Monoclonal Antibodies For Cancer Detection And Therapy. Baldwin et al. (eds.), 1985, pp. 303-16. Academic Press; and Thorpe et al. (1982) “The Preparation And Cytotoxic Properties Of Antibody-Toxin Conjugates,” Immunol. Rev., 62:119-158; each of which is incorporated herein by reference.

[0235] Further, the compositions of the present disclosure may be assembled into kits. In some embodiments, the kit comprises nucleic acid vectors for the expression of the nucleobase editors described herein. In some embodiments, the kit further comprises appropriate guide nucleotide sequences (e.g., gRNAs) or nucleic acid vectors for the expression of such guide nucleotide sequences, to target the nucleobase editors to the desired target sequence.

[0236] The kit described herein may include one or more containers housing components for performing the methods described herein and optionally instructions of uses. Any of the kit described herein may further comprise components needed for performing the assay methods. Each component of the kits, where applicable, may be provided in liquid form (e.g., in solution), or in solid form, (e.g., a dry powder). In certain cases, some of the components may be reconstitutable or otherwise processible (e.g., to an active form), for example, by the addition of a suitable solvent or other species (for example, water or certain organic solvents), which may or may not be provided with the kit.

[0237] In some embodiments, the kits may optionally include instructions and/or promotion for use of the components provided. As used herein, “instructions” can define a component of instruction and/or promotion, and typically involve written instructions on or associated with packaging of the disclosure. Instructions also can include any oral or electronic instructions provided in any manner such that a user will clearly recognize that the instructions are to be associated with the kit, for example, audiovisual (e.g., videotape. DVD, etc.). Internet, and/or web-based communications, etc. The written instructions may be in a form prescribed by a governmental agency regulating the manufacture, use, or sale of pharmaceuticals or biological products, which can also reflect approval by the agency of manufacture, use or sale for animal administration. As used herein, “promoted” includes all methods of doing business including methods of education, hospital and other clinical instruction, scientific inquiry, drug discovery or development, academic research, pharmaceutical industry activity including pharmaceutical sales, and any advertising or other promotional activity including written, oral and electronic communication of any form, associated with the disclosure. Additionally, the kits may include other components depending on the specific application, as described herein.

[0238] The kits may contain any one or more of the components described herein in one or more containers. The components may be prepared sterilely, packaged in a syringe, and shipped refrigerated. Alternatively it may be housed in a vial or other container for storage. A second container may have other components prepared sterilely. Alternatively the kits may include the active agents premixed and shipped in a vial, tube, or other container.

[0239] The kits may have a variety of forms, such as a blister pouch, a shrink wrapped pouch, a vacuum sealable pouch, a sealable thermoformed tray, or a similar pouch or tray form, with the accessories loosely packed within the pouch, one or more tubes, containers, a box or a bag. The kits may be sterilized after the accessories are added, thereby allowing the individual accessories in the container to be otherwise unwrapped. The kits can be sterilized using any appropriate sterilization techniques, such as radiation sterilization, heat sterilization, or other sterilization methods known in the art. The kits may also include other components, depending on the specific application, for example, containers, cell media, salts, buffers, reagents, syringes, needles, a fabric such as gauze, for applying or removing a disinfecting agent, disposable gloves, a support for the agents prior to administration, etc.

### Therapeutics

[0240] The compositions and kits described herein may be administered to a subject in need thereof, in a therapeutically effective amount, to prevent or treat conditions related to HIV infection and/or AIDS. The compositions and kits are effective in preventing or treating HIV infection in the subject or reducing the potential for HIV infection in the subject (including prevention of HIV infection in a subject).

[0241] “A therapeutically effective amount” as used herein refers to the amount of each therapeutic agent of the present disclosure required to confer therapeutic effect on the subject, either alone or in combination with one or more other therapeutic agents. Effective amounts vary, as recognized by those skilled in the art, depending on the particular condition being treated, the severity of the condition, the individual subject parameters including age, physical condition, size, gender and weight, the duration of the treatment, the nature of concurrent therapy (if any), the specific route of administration and like factors within the knowledge and expertise of the health practitioner. These factors are well known to those of ordinary skill in the art and can be addressed with no more than routine experimentation. It is generally preferred that a maximum dose of the individual components or combinations thereof be used, that is, the highest safe dose according to sound medical judgment. It will be understood by those of ordinary skill in the art, however, that a subject may insist upon a lower dose or tolerable dose for medical reasons, psychological reasons or for virtually any other reasons. Empirical considerations, such as the half-life, generally will contribute to the determination of the dosage. For example, therapeutic agents that are compatible with the human immune system, such as polypeptides comprising regions from humanized antibodies or fully human antibodies, may be used to prolong the half-life of the polypeptide and to prevent the polypeptide being attacked by the host's immune system.

[0242] Frequency of administration may be determined and adjusted over the course of therapy, and is generally, but not necessarily, based on treatment and/or suppression and/or amelioration and/or delay of a disease. Alternatively, sustained continuous release formulations of a polypeptide or a polynucleotide (e.g., RNA or DNA) may be appropriate. Various formulations and devices for achieving sustained release are known in the art. In some embodiments, dosage is daily, every other day, every three days, every four days, every five days, or every six days. In some embodiments, dosing frequency is once every week, every 2 weeks, every 4 weeks, every 5 weeks, every 6 weeks, every 7 weeks, every 8 weeks, every 9 weeks, or every 10 weeks; or once every month, every 2 months, or every 3 months, or longer. The progress of this therapy is easily monitored by conventional techniques and assays.

[0243] The dosing regimen (including the polypeptide or the polynucleotide used) can vary over time. In some embodiments, for an adult subject of normal weight, doses ranging from about 0.01 to 1000 mg/kg may be administered. In some embodiments, the dose is between 1 to 200 mg. The particular dosage regimen, i.e., dose, timing and repetition, will depend on the particular subject and that subject's medical history, as well as the properties of the polypeptide or the polynucleotide (such as the half-life of the polypeptide or the polynucleotide, and other considerations well known in the art).

[0244] For the purpose of the present disclosure, the appropriate dosage of a therapeutic agent as described herein will depend on the specific agent (or compositions thereof) employed, the formulation and route of administration, the type and severity of the disease, whether the polypeptide or the polynucleotide is administered for preventive or therapeutic purposes, previous therapy, the subject's clinical history and response to the antagonist, and the discretion of the attending physician. Typically the clinician will administer a polypeptide or a polynucleotide until a dosage is reached that achieves the desired result.

[0245] Administration of one or more polypeptides or polynucleotides can be continuous or intermittent, depending, for example, upon the recipient's physiological condition, whether the purpose of the administration is therapeutic or prophylactic, and other factors known to skilled practitioners. The administration of a polypeptide or a polynucleotide may be essentially continuous over a preselected period of time or may be in a series of spaced dose, e.g., either before, during, or after developing a disease. As used herein, the term “treating” refers to the application or administration of a polypeptide or a polynucleotide or composition including the polypeptide or the polynucleotide to a subject in need thereof. As used herein, “treating” a disease includes preventing disease onset. e.g., preventing HIV infection and/or preventing the onset of AIDS.

[0246] “A subject in need thereof” refers to an individual who has a disease, a symptom of the disease, or a predisposition or susceptibility toward the disease, with the purpose to prevent, cure, heal, alleviate, relieve, alter, remedy, ameliorate, improve, or affect the disease, one or more symptoms of the disease, or predisposition toward the disease. In some embodiments, the subject is at risk of becoming infected with HIV. In some embodiments, the subject is infected with HIV. In some embodiments, the subject has AIDS. In some embodiments, the subject is a mammal. In some embodiments, the subject is a non-human primate. In some embodiments, the subject is human. Alleviating a disease includes delaying the development or progression of the disease (i.e., AIDS), or reducing disease severity. Alleviating the disease does not necessarily require curative results.

[0247] As used therein, “delaying” the development of a disease means to defer, hinder, slow, retard, stabilize, and/or postpone progression of the disease. This delay can be of varying lengths of time, depending on the history of the disease and/or individuals being treated. A method that “delays” or alleviates the development of a disease, or delays the onset of the disease, is a method that reduces probability of developing one or more symptoms of the disease in a given time frame and/or reduces extent of the symptoms in a given time frame, when compared to not using the method. Such comparisons are typically based on clinical studies, using a number of subjects sufficient to give a statistically significant result.

[0248] “Development” or “progression” of a disease means initial manifestations and/or ensuing progression of the disease. Development of the disease can be detectable and assessed using standard clinical techniques as well known in the art. However, development also refers to progression that may be undetectable. For purpose of this disclosure, development or progression refers to the biological course of the symptoms. “Development” includes occurrence, recurrence, and onset.

[0249] As used herein “onset” or “occurrence” of a disease includes initial onset and/or recurrence. Conventional methods, known to those of ordinary skill in the art of medicine, can be used to administer the isolated polypeptide or pharmaceutical composition to the subject, depending upon the type of disease to be treated or the site of the disease. This composition can also be administered via other conventional routes, e.g., administered orally, parenterally, by inhalation spray, topically, rectally, nasally, buccally, vaginally, or via an implanted reservoir.

[0250] The term “parenteral,” as used herein, includes subcutaneous, intracutaneous, intravenous, intramuscular, intraarticular, intraarterial, intrasynovial, intrasternal, intrathecal, intralesional, and intracranial injection or infusion techniques. In addition, the compositions described herein can be administered to the subject via injectable depot routes of administration such as using 1-, 3-, or 6-month depot injectable or biodegradable materials and methods.

### Host Cells and Organisms

[0251] Other aspects of the present disclosure provide host cells and organisms for the production and/or isolation of the nucleobase editors, e.g., for in vitro editing. Host cells are genetically engineered to express the nucleobase editors and components of the translation system described herein. In some embodiments, host cells comprise vectors encoding the nucleobase editors and components of the translation system (e.g., transformed, transduced, or transfected), which can be, for example, a cloning vector or an expression vector. The vector can be, for example, in the form of a plasmid, a bacterium, a virus, a naked polynucleotide, or a conjugated polynucleotide. The vectors are introduced into cells and/or microorganisms by standard methods including electroporation, infection by viral vectors, high velocity ballistic penetration by small particles with the nucleic acid either within the matrix of small beads or particles, or on the surface (Klein et al., Nature 327, 70-73 (1987), which is incorporated herein by reference). In some embodiments, the host cell is a prokaryotic cell. In some embodiments, the host cell is a eukaryotic cell. In some embodiments, the host cell is a bacterial cell. In some embodiments, the host cell is a yeast cell. In some embodiments, the host cell is a mammalian cell. In some embodiments, the host cell is a human cell. In some embodiments, the host cell is a cultured cell. In some embodiments, the host cell is within a tissue or an organism.

[0252] The engineered host cells can be cultured in conventional nutrient media modified as appropriate for such activities as, for example, screening steps, activating promoters or selecting transformants. These cells can optionally be cultured into transgenic organisms.

[0253] Several well-known methods of introducing target nucleic acids into bacterial cells are available, any of which can be used in the present disclosure. These include: fusion of the recipient cells with bacterial protoplasts containing the DNA, electroporation, projectile bombardment, and infection with viral vectors (discussed further, below), etc. Bacterial cells can be used to amplify the number of plasmids containing DNA constructs of the present disclosure. The bacteria are grown to log phase and the plasmids within the bacteria can be isolated by a variety of methods known in the art (see, for instance, Sambrook). In addition, a plethora of kits are commercially available for the purification of plasmids from bacteria, (see, e.g., EasyPrep™, FlexiPrep™, both from Pharmacia Biotech; StrataClean™, from Stratagene; and, QIAprep™ from Qiagen). The isolated and purified plasmids are then further manipulated to produce other plasmids, used to transfect cells or incorporated into related vectors to infect organisms. Typical vectors contain transcription and translation terminators, transcription and translation initiation sequences, and promoters useful for regulation of the expression of the particular target nucleic acid. The vectors optionally comprise generic expression cassettes containing at least one independent terminator sequence, sequences permitting replication of the cassette in eukaryotes, or prokaryotes, or both, (e.g., shuttle vectors) and selection markers for both prokaryotic and eukaryotic systems. Vectors are suitable for replication and integration in prokaryotes, eukaryotes, or preferably both. See. Giliman & Smith, Gene 8:81 (1979); Roberts, et al., Nature, 328:731 (1987); and Schneider, B., et al., Protein Expr. Purifi 6435:10 (1995)), the entire contents of each of which are incorporated herein by reference.

[0254] Bacteriophages useful for cloning is provided, e.g., by the ATCC, e.g., The ATCC Catalogue of Bacteria and Bacteriophage (1992) Gherna et al. (eds) published by the ATCC. Additional basic procedures for sequencing, cloning and other aspects of molecular biology and underlying theoretical considerations are also found in Watson et al. (1992) Recombinant DNA Second Edition Scientific American Books. NY, the entire contents of which is incorporated herein by reference.

[0255] Other useful references, e.g., for cell isolation and culture (e.g., for subsequent nucleic acid isolation) include Freshney (1994) Culture of Animal Cells, a Manual of Basic Technique, third edition, Wiley-Liss, New York and the references cited therein; Payne et al. (1992) Plant Cell and Tissue Culture in Liquid Systems John Wiley & Sons, Inc. New York, NY; Gamborg and Phillips (eds) (1995) Plant Cell. Tissue and Organ Culture; Fundamental Methods Springer Lab Manual. Springer-Verlag (Berlin Heidelberg New York) and Atlas and Parks (eds) The Handbook of Microbiological Media (1993) CRC Press, Boca Raton. FL, the entire contents of each of which are incorporated herein by reference. In addition, essentially any nucleic acid (and virtually any labeled nucleic acid, whether standard or non-standard) can be custom or standard ordered from any of a variety of commercial sources, such as The Midland Certified Reagent Company (mcrc@oligos.com), The Great American Gene Company (www.genco.com), ExpressGen Inc. (www.expressgen.com), Operon Technologies Inc. (Alameda. CA), and many others.

[0256] Without further elaboration, it is believed that one skilled in the art can, based on the above description, utilize the present disclosure to its fullest extent. The following specific embodiments are, therefore, to be construed as merely illustrative, and not limitative of the remainder of the disclosure in any way whatsoever. All publications cited herein are incorporated by reference for the purposes or subject matter referenced herein.

### EXAMPLES

[0257] In order that the compositions and methods described herein may be more fully understood, the following examples are set forth. The synthetic examples described in this application are offered to illustrate the compounds and methods provided herein and are not to be construed in any way as limiting their scope.

### Example 1: Guide Nucleotide Sequence-Programmable DNA-Binding Protein Domains, Deaminases, and Base Editors

[0258] Non-limiting examples of suitable guide nucleotide sequence-programmable DNA-binding protein domains are provided. The disclosure provides Cas9 variants, for example. Cas9 proteins from one or more organisms, which may comprise one or more mutations (e.g., to generate dCas9 or Cas9 nickase). In some embodiments, one or more of the amino acid residues, identified below by an asterisk, of a Cas9 protein may be mutated. In some embodiments, the D10 and/or H840 residues of the amino acid sequence provided in SEQ ID NO: 1, or a corresponding mutation in any of the amino acid sequences provided in SEQ ID NOs: 11-260, are mutated. In some embodiments, the D10 residue of the amino acid sequence provided in SEQ ID NO: 1, or a corresponding mutation in any of the amino acid sequences provided in SEQ ID NOs: 11-260, is mutated to any amino acid residue, except for D. In some embodiments, the D10 residue of the amino acid sequence provided in SEQ ID NO: 1, or a corresponding mutation in any of the amino acid sequences provided in SEQ ID NOs: 11-260, is mutated to an A. In some embodiments, the H840 residue of the amino acid sequence provided in SEQ ID NO: 1, or a corresponding residue in any of the amino acid sequences provided in SEQ ID NOs: 11-260, is an H. In some embodiments, the H840 residue of the amino acid sequence provided in SEQ ID NO: 1, or a corresponding mutation in any of the amino acid sequences provided in SEQ ID NOs: 11-260, is mutated to any amino acid residue, except for H. In some embodiments, the H840 residue of the amino acid sequence provided in SEQ ID NO: 1, or a corresponding mutation in any of the amino acid sequences provided in SEQ ID NOs: 11-260, is mutated to an A. In some embodiments, the D10 residue of the amino acid sequence provided in SEQ ID NO: 1, or a corresponding residue in any of the amino acid sequences provided in SEQ ID NOs: 11-260, is a D.

[0259] A number of Cas9 sequences from various species were aligned to determine whether corresponding homologous amino acid residues of D10 and H840 of SEQ ID NO: 1 or SEQ ID NO: 11 can be identified in other Cas9 proteins, allowing the generation of Cas9 variants with corresponding mutations of the homologous amino acid residues. The alignment was carried out using the NCBI Constraint-based Multiple Alignment Tool (COBALT (accessible at st-va.ncbi.nlm.nih.gov/tools/cobalt), with the following parameters. Alignment parameters: Gap penalties −11, −1; End-Gap penalties −5, −1. CDD Parameters: Use RPS BLAST on; Blast E-value 0.003; Find Conserved columns and Recompute on. Query Clustering Parameters: Use query clusters on; Word Size 4; Max cluster distance 0.8; Alphabet Regular.

[0260] An exemplary alignment of four Cas9 sequences is provided below. The Cas9 sequences in the alignment are: Sequence 1 (S1): SEQ ID NO: 11|WP_010922251|gi 499224711| type II CRISPR RNA-guided endonuclease Cas9 [Streptococcus pyogenes]; Sequence 2 (S2): SEQ ID NO: 12|WP_039695303|gi 746743737| type II CRISPR RNA-guided endonuclease Cas9 [Streptococcus gallolyticus]; Sequence 3 (S3): SEQ ID NO: 13|WP_045635197|gi 782887988|type II CRISPR RNA-guided endonuclease Cas9 [Streptococcus mitis]; Sequence 4 (S4): SEQ ID NO: 14|5AXW_A|gi 924443546| Staphylococcus aureus Cas9. The HNH domain (bold and underlined) and the RuvC domain (boxed) are identified for each of the four sequences. Amino acid residues 10 and 840 in S1 and the homologous amino acids in the aligned sequences are identified with an asterisk following the respective amino acid residue.

| | | | |
|---|---|---|---|
| S1 | 1 | --MDKK-YSIGLD*IGTNSVGWAVITDEYKVPSKKFKVLGNTDRHSIKKNLI--GALLFDSG--ETAEATRLKRTARRRYT | 73 |
| S2 | 1 | --MTKKNYSIGLD*IGTNSVGWAVITDDYKVPAKKMKVLGNTDKKYIKKNLL--GALLFDSG--ETAEATRLKRTARRRYT | 74 |
| S3 | 1 | --M-KKGYSIGLD*IGTNSVGFAVITDDYKVPSKKMKVLGNTDKRFIKKNLI--GALLFDEG--TTAEARRLKRTARRRYT | 73 |
| S4 | 1 | GSHMKRNYILGLD*IGITSVGYGII--DYET-----------------RDVIDAGVRLFKEANVENNEGRRSKRGARRLKR | 61 |
| S1 | 74 | RRKNRICYLQEIFSNEMAKVDDSFFHRLEESFLVEEDKKHERHPIFGNIVDEVAYHEKYPTIYHLRKKLVDSTDKADLRL | 153 |
| S2 | 75 | RRKNRLRYLQEIFANEIAKVDESFFQRLDESFLTDDDKTFDSHPIFGNKAEEDAYHQKFPTIYHLRKHLADSSEKADLRL | 154 |
| S3 | 74 | RRKNRLRYLQEIFSEEMSKVDSSFFHRLDDSFLIPEDKRESKYPIFATLTEEKEYHKQFPTIYHLRKQLADSKEKTDLRL | 153 |
| S4 | 62 | RRRHRIQRVKKLL--------------FDYNLLTD--------------------HSELSGINPYEARVKGLSQKLSEEE | 107 |
| S1 | 154 | IYLALAHMIKFRGHFLIEGDLNPDNSDVDKLFIQLVQTYNQLFEENPINASGVDAKAILSARLSKSRRLENLIAQLPGEK | 233 |
| S2 | 155 | VYLALAHMIKFRGHFLIEGELNAENTDVQKIFADFVGVYNRTFDDSHLSEITVDVASILTEKISKSRRLENLIKYYPTEK | 234 |
| S3 | 154 | IYLALAHMIKYRGHFLYEEAFDIKNNDIQKIFNEFISIYDNTFEGSSLSGQNAQVEAIFTDKISKSAKRERVLKLFPDEK | 233 |
| S4 | 108 | FSAALLHLAKRRG----------------------VHNVNEVEEDT---------------------------------- | 131 |
| S1 | 234 | KNGLFGNLIALSLGLTPNFKSNFDLAEDAKLQLSKDTYDDDLDNLLAQIGDQYADLFLAAKNLSDAILLSDILRVNTEIT | 313 |
| S2 | 235 | KNTLFGNLIALALGLQPNFKTNFKLSEDAKLQFSKDTYEEDLEELLGKIGDDYADLFTSAKNLYDAILLSGILTVDDNST | 314 |
| S3 | 234 | STGLFSEFLKLIVGNQADFKKHFDLEDKAPLQFSKDTYDEDLENLLGQIGDDFTDLFVSAKKLYDAILLSGILTVTDPST | 313 |
| S4 | 132 | -----GNELS------------------TKEQISRN-------------------------------------------- | 144 |
| S1 | 314 | KAPLSASMIKRYDEHHQDLTLLKALVRQQLPEKYKEIFFDQSKNGYAGYIDGGASQEEFYKFIKPILEKM--DGTEELLV | 391 |
| S2 | 315 | KAPLSASMIKRYVEHHEDLEKLKEFIKANKSELYHDIFKDKNKNGYAGYIENGVKQDEFYKYLKNILSKIKIDGSDYFLD | 394 |
| S3 | 314 | KAPLSASMIERYENHQNDLAALKQFIKNNLPEKYDEVFSDQSKDGYAGYIDGKTTQETFYKYIKNLLSKF--EGTDYFLD | 391 |
| S4 | 145 | ----SKALEEKYVAELQ-------------------------------------------------LERLKKDG------ | 165 |
| S1 | 392 | KLNREDLLRKQRTFDNGSIPHQIHLGELHAILRRQEDFYPFLKDNREKIEKILTFRIPYYVGPLARGNSRFAWMTRKSEE | 471 |
| S2 | 395 | KIEREDFLRKQRTFDNGSIPHQIHLQEMHAILRRQGDYYPFLKEKQDRIEKILTFRIPYYVGPLVRKDSRFAWAEYRSDE | 474 |
| S3 | 392 | KIEREDFLRKQRTFDNGSIPHQIHLQEMNAILRRQGEYYPFLKDNKEKIEKILTFRIPYYVGPLARGNRDFAWLTRNSDE | 471 |
| S4 | 166 | --EVRGSINRFKTSD--------YVKEAKQLLKVQKAYHQLDQSFIDTYIDLLETRRTYYEGP--GEGSPFGW------K | 227 |
| S1 | 472 | TITPWNFEEVVDKGASAQSFIERMTNFDKNLPNEKVLPKHSLLYEYFTVYNELTKVKYVTEGMRKPAFLSGEQKKAIVDL | 551 |
| S2 | 475 | KITPWNFDKVIDKEKSAEKFITRMTLNDLYLPEEKVLPKHSHVYETYAVYNELTKIKYVNEQGKE-SFFDSNMKQEIFDH | 553 |
| S3 | 472 | AIRPWNFEEIVDKASSAEDFINKMTNYDLYLPEEKVLPKHSLLYETFAVYNELTKVKFIAEGLRDYQFLDSGQKKQIVNQ | 551 |
| S4 | 228 | DIKEW---------------YEMLMGHCTYFPEELRSVKYAYNADLYNALNDLNNLVITRDENEK---LEYYEKFQIIEN | 289 |
| S1 | 552 | LFKTNRKVTVKQLKEDYFKKIECFDSVEISGVEDR---FNASLGTYHDLLKIIKDKDFLDNEENEDILEDIVLTLTLFED | 628 |
| S2 | 554 | VFKENRKVTKEKLLNYLNKEFPEYRIKDLIGLDKENKSFNASLGTYHDLKKIL-DKAFLDDKVNEEVIEDIIKTLTLFED | 632 |
| S3 | 552 | LFKENRKVTEKDIIHYLHN-VDGYDGIELKGIEKQ---FNASLSTYHDLLKIIKDKEFMDDAKNEAILENIVHTLTIFED | 627 |
| S4 | 290 | VFKQKKKPTLKQIAKEILVNEEDIKGYRVTSTGKPEF---TNLKVYHDIKDITARKEII---ENAELLDQIAKILTIYQS | 363 |
| S1 | 629 | REMIEERLKTYAHLFDDKVMKQLKR-RRYTGWGRLSRKLINGIRDKQSGKTILDFLKSDGFANRNFMQLIHDDSLTFKED | 707 |
| S2 | 633 | KDMIHERLQKYSDIFTANQLKKLER-RHYTGWGRLSYKLINGIRNKENNKTILDYLIDDGSANRNFMQLINDDTLPFKQI | 711 |
| S3 | 628 | REMIKQRLAQYDSLFDEKVIKALTR-RHYTGWGKLSAKLINGICDKQTGNTILDYLIDDGKINRNFMQLINDDGLSFKEI | 706 |
| S4 | 364 | SEDIQEELTNLNSELTQEEIEQISNLKGYTGTHNLSLKAINLILDE------LWHTNDNQIAIFNRLKLVP--------- | 428 |
| S1 | 708 | [chemical structure] | 781 |
| S2 | 712 | [chemical structure] | 784 |
| S3 | 707 | [chemical structure] | 779 |
| S4 | 429 | [chemical structure] | 505 |
| S1 | 782 | KRIEEGIKELGSQIL-------KEHPVENTQLQNEKLYLYYLQNGRDMYVDQELDINRLSD----YDVDH*IVPQSFLKDD | 850 |
| S2 | 785 | KKLQNSLKELGSNILNEEKPSYIEDKVENSHLQNDQLFLYYIQNGKDMYTGDELDIDHLSD----YDIDH*IIPQAFIKDD | 860 |
| S3 | 780 | KRIEDSLKILASGL---DSNILKENPTDNNQLQNDRLFLYYLQNGKDMYTGEALDINQLSS----YDIDH*IIPQAFIKDD | 852 |
| S4 | 506 | ERIEEIIRTTGK---------------ENAKYLIEKIKLHDMQEGKCLYSLEAIPLEDLLNNPFNYEVDH*IIPRSVSFDN | 570 |
| S1 | 851 | [chemical structure] | 922 |
| S2 | 861 | [chemical structure] | 932 |
| S3 | 853 | [chemical structure] | 924 |
| S4 | 571 | [chemical structure] | 650 |
| S1 | 923 | [chemical structure] | 1002 |
| S2 | 933 | [chemical structure] | 1012 |
| S3 | 925 | [chemical structure] | 1004 |
| S4 | 651 | [chemical structure] | 712 |
| S1 | 1003 | [chemical structure] | 1077 |
| S2 | 1013 | [chemical structure] | 1083 |
| S3 | 1005 | [chemical structure] | 1081 |
| S4 | 713 | [chemical structure] | 764 |
| S1 | 1078 | [chemical structure] | 1149 |
| S2 | 1084 | [chemical structure] | 1158 |
| S3 | 1082 | [chemical structure] | 1156 |
| S4 | 765 | [chemical structure] | 835 |
| S1 | 1150 | EKGKSKKLKSVKELLGITIMERSSFEKNPI-DFLEAKG-----YKEVKKDLIIKLPKYSLFELENGRKRMLASAGELQKG | 1223 |
| S2 | 1159 | EKGKAKKLKTVKELVGISIMERSFFEENPV-EFLENKG-----YHNIREDKLIKLPKYSLFEFEGGRRRLLASASELQKG | 1232 |
| S3 | 1157 | EKGKAKKLKTVKTLVGITIMEKAAFEENPI-TFLENKG-----YHNVRKENILCLPKYSLFELENGRRRLLASAKELQKG | 1230 |
| S4 | 836 | DPQTYQKLK--------LIMEQYGDEKNPLYKYYEETGNYLTKYSKKDNGPVIKKIKYYGNKLNAHLDITDDYPNSRNKV | 907 |
| S1 | 1224 | NELALPSKYVNFLYLASHYEKLKGSPEDNEQKQLFVEQHKHYLDEIIEQISEFSKRVILADANLDKVLSAYNKH------ | 1297 |
| S2 | 1233 | NEMVLPGYLVELLYHAHRADNF-----NSTEYLNYVSEHKKEFEKVLSCVEDFANLYVDVEKNLSKIRAVADSM------ | 1301 |
| S3 | 1231 | NEIVLPVYLTTLLYHSKNVHKL-----DEPGHLEYIQKHRNEFKDLLNLVSEFSQKYVLADANLEKIKSLYADN------ | 1299 |
| S4 | 908 | VKLSLKPYRFD-VYLDNGVYKFV-----TVKNLDVIK--KENYYEVNSKAYEEAKKLKKISNQAEFIASFYNNDLIKING | 979 |
| S1 | 1298 | RDKPIREQAENIIHLFTLTNLGAPAAFKYFDTTIDRKRYTSTKEVLDATLIHQSIT--------GLYETRI----DLSQL | 1365 |
| S2 | 1302 | DNFSIEEISNSFINLLTLTALGAPADFNFLGEKIPRKRYTSTKECLNATLIHQSIT--------GLYETRI----DLSKL | 1369 |
| S3 | 1300 | EQADIEILANSFINLLTFTALGAPAAFKFFGKDIDRKRYTTVSEILNATLIHQSIT--------GLYETWI----DLSKL | 1367 |
| S4 | 980 | ELYRVIGVNNDLLNRIEVNMIDITYR-EYLENMNDKRPPRIIKTIASKT---QSIKKYSTDILGNLYEVKSKKHPQIIKK | 1055 |
| S1 | 1366 | GGD | 1368 |
| S2 | 1370 | GEE | 1372 |
| S3 | 1368 | GED | 1370 |
| 54 | 1056 | G-- | 1056 |

[0261] The alignment demonstrates that amino acid sequences and amino acid residues that are homologous to a reference Cas9 amino acid sequence or amino acid residue can be identified across Cas9 sequence variants, including, but not limited to Cas9 sequences from different species, by identifying the amino acid sequence or residue that aligns with the reference sequence or the reference residue using alignment programs and algorithms known in the art. This disclosure provides Cas9 variants in which one or more of the amino acid residues identified by an asterisk in SEQ ID NOs: 11-14 (e.g., S1, S2, S3, and S4, respectively) are mutated as described herein. The residues D10 and H840 in Cas9 of SEQ ID NO: 1 that correspond to the residues identified in SEQ ID NOs: 11-14 by an asterisk are referred to herein as “homologous” or “corresponding” residues. Such homologous residues can be identified by sequence alignment, e.g., as described above, and by identifying the sequence or residue that aligns with the reference sequence or residue. Similarly, mutations in Cas9 sequences that correspond to mutations identified in SEQ ID NO: 1 herein, e.g., mutations of residues 10, and 840 in SEQ ID NO: 1, are referred to herein as “homologous” or “corresponding” mutations. For example, the mutations corresponding to the D10A mutation in SEQ ID NO: 1 or S1 (SEQ ID NO: 11) for the four aligned sequences above are D11A for S2, D10A for S3, and D13A for S4; the corresponding mutations for H840A in SEQ ID NO: 1 or S1 (SEQ ID NO: 11) are H850A for S2, H842A for S3, and H560A for S4.

[0262] A total of 250 Cas9 sequences (SEQ ID NOs: 11-260) from different species are provided. Amino acid residues homologous to residues 10, and 840 of SEQ ID NO: 1 may be identified in the same manner as outlined above. All of these Cas9 sequences may be used in accordance with the present disclosure.

| | | |
|---|---|---|
| WP_010922251.1 | type II CRISPR RNA-guided endonuclease Cas9 [Streptococcus pyogenes] | SEQ ID NO: 11 |
| WP_039695303.1 | type II CRISPR RNA-guided endonuclease Cas9 [Streptococcus gallolyticus] | SEQ ID NO: 12 |
| WP_045635197.1 | type II CRISPR RNA-guided endonuclease Cas9 [Streptococcus mitis] | SEQ ID NO: 13 |
| 5AXW_A | Cas9, Chain A, Crystal Structure [Staphylococcus Aureus] | SEQ ID NO: 14 |
| WP_009880683.1 | type II CRISPR RNA-guided endonuclease Cas9 [Streptococcus pyogenes] | SEQ ID NO: 15 |
| WP_010922251.1 | type II CRISPR RNA-guided endonuclease Cas9 [Streptococcus pyogenes] | SEQ ID NO: 16 |
| WP_011054416.1 | type II CRISPR RNA-guided endonuclease Cas9 [Streptococcus pyogenes ] | SEQ ID NO: 17 |
| WP_011284745.1 | type II CRISPR RNA-guided endonuclease Cas9 [ Streptococcus pyogenes] | SEQ ID NO: 18 |
| WP_011285506.1 | type II CRISPR RNA-guided endonuclease Cas9 [ Streptococcus pyogenes] | SEQ ID NO: 19 |
| WP_011527619.1 | type II CRISPR RNA-guided endonuclease Cas9 [Streptococcus pyogenes] | SEQ ID NO: 20 |
| WP_012560673.1 | type II CRISPR RNA-guided endonuclease Cas9 [Streptococcus pyogenes] | SEQ ID NO: 21 |
| WP_014407541.1 | type II CRISPR RNA-guided endonuclease Cas9 [Streptococcus pyogenes] | SEQ ID NO: 22 |
| WP_020905136.1 | type II CRISPR RNA-guided endonuclease Cas9 [Streptococcus pyogenes] | SEQ ID NO: 23 |
| WP_023080005.1 | type II CRISPR RNA-guided endonuclease Cas9 [Streptococcus pyogenes] | SEQ ID NO: 24 |
| WP_023610282.1 | type II CRISPR RNA-guided endonuclease Cas9 [Streptococcus pyogenes] | SEQ ID NO: 25 |
| WP_030125963.1 | type II CRISPR RNA-guided endonuclease Cas9 [Streptococcus pyogenes] | SEQ ID NO: 26 |
| WP_030126706.1 | type II CRISPR RNA-guided endonuclease Cas9 [Streptococcus pyogenes] | SEQ ID NO: 27 |
| WP_031488318.1 | type II CRISPR RNA-guided endonuclease Cas9 [Streptococcus pyogenes] | SEQ ID NO: 28 |
| WP_032460140.1 | type II CRISPR RNA-guided endonuclease Cas9 [Streptococcus pyogenes] | SEQ ID NO: 29 |
| WP_032461047.1 | type II CRISPR RNA-guided endonuclease Cas9 [Streptococcus pyogenes] | SEQ ID NO: 30 |
| WP_032462016.1 | type II CRISPR RNA-guided endonuclease Cas9 [Streptococcus pyogenes] | SEQ ID NO: 31 |
| WP_032462936.1 | type II CRISPR RNA-guided endonuclease Cas9 [Streptococcus pyogenes] | SEQ ID NO: 32 |
| WP_032464890.1 | type II CRISPR RNA-guided endonuclease Cas9 [Streptococcus pyogenes] | SEQ ID NO: 33 |
| WP_033888930.1 | type II CRISPR RNA-guided endonuclease Cas9 [Streptococcus pyogenes] | SEQ ID NO: 34 |
| WP_038431314.1 | type II CRISPR RNA-guided endonuclease Cas9 [Streptococcus pyogenes] | SEQ ID NO: 35 |
| WP_038432938.1 | type II CRISPR RNA-guided endonuclease Cas9 [Streptococcus pyogenes] | SEQ ID NO: 36 |
| WP_038434062.1 | type II CRISPR RNA-guided endonuclease Cas9 [Streptococcus pyogenes] | SEQ ID NO: 37 |
| BAQ51233.1 | CRISPR-associated protein, Csn1 family [Streptococcus pyogenes] | SEQ ID NO: 38 |
| KGE60162.1 | hypothetical protein MGAS2111_0903 [Streptococcus pyogenes MGAS2111] | SEQ ID NO: 39 |
| KGE60856.1 | CRISPR-associated endonuclease protein [Streptococcus pyogenes SS1447] | SEQ ID NO: 40 |
| WP_002989955.1 | MULTISPECIES: type II CRISPR RNA-guided endonuclease Cas9 [Streptococcus] | SEQ ID NO: 41 |
| WP_003030002.1 | MULTISPECIES: type II CRISPR RNA-guided endonuclease Cas9 [Streptococcus] | SEQ ID NO: 42 |
| WP_003065552.1 | MULTISPECIES: type II CRISPR RNA-guided endonuclease Cas9 [Streptococcus] | SEQ ID NO: 43 |
| WP_001040076.1 | type II CRISPR RNA-guided endonuclease Cas9 [Streptococcus agalactiae] | SEQ ID NO: 44 |
| WP_001040078.1 | type II CRISPR RNA-guided endonuclease Cas9 [Streptococcus agalactiae] | SEQ ID NO: 45 |
| WP_001040080.1 | type II CRISPR RNA-guided endonuclease Cas9 [Streptococcus agalactiae] | SEQ ID NO: 46 |
| WP_001040081.1 | type II CRISPR RNA-guided endonuclease Cas9 [Streptococcus agalactiae] | SEQ ID NO: 47 |
| WP_001040083.1 | type II CRISPR RNA-guided endonuclease Cas9 [Streptococcus agalactiae] | SEQ ID NO: 48 |
| WP_001040085.1 | type II CRISPR RNA-guided endonuclease Cas9 [Streptococcus agalactiae] | SEQ ID NO: 49 |
| WP_001040087.1 | type II CRISPR RNA-guided endonuclease Cas9 [Streptococcus agalactiae] | SEQ ID NO: 50 |
| WP_001040088.1 | type II CRISPR RNA-guided endonuclease Cas9 [Streptococcus agalactiae] | SEQ ID NO: 51 |
| WP_001040089.1 | type II CRISPR RNA-guided endonuclease Cas9 [Streptococcus agalactiae] | SEQ ID NO: 52 |
| WP_001040090.1 | type II CRISPR RNA-guided endonuclease Cas9 [Streptococcus agalactiae] | SEQ ID NO: 53 |
| WP_001040091.1 | type II CRISPR RNA-guided endonuclease Cas9 [Streptococcus agalactiae] | SEQ ID NO: 54 |
| WP_001040092.1 | type II CRISPR RNA-guided endonuclease Cas9 [Streptococcus agalactiae] | SEQ ID NO: 55 |
| WP_001040094.1 | type II CRISPR RNA-guided endonuclease Cas9 [Streptococcus agalactiae] | SEQ ID NO: 56 |
| WP_001040095.1 | type II CRISPR RNA-guided endonuclease Cas9 [Streptococcus agalactiae] | SEQ ID NO: 57 |
| WP_001040096.1 | type II CRISPR RNA-guided endonuclease Cas9 [Streptococcus agalactiae] | SEQ ID NO: 58 |
| WP_001040097.1 | type II CRISPR RNA-guided endonuclease Cas9 [Streptococcus agalactiae] | SEQ ID NO: 59 |
| WP_001040098.1 | type II CRISPR RNA-guided endonuclease Cas9 [Streptococcus agalactiae] | SEQ ID NO: 60 |
| WP_001040099.1 | type II CRISPR RNA-guided endonuclease Cas9 [Streptococcus agalactiae] | SEQ ID NO: 61 |
| WP_001040100.1 | type II CRISPR RNA-guided endonuclease Cas9 [Streptococcus agalactiae] | SEQ ID NO: 62 |
| WP_001040104.1 | type II CRISPR RNA-guided endonuclease Cas9 [Streptococcus agalactiae] | SEQ ID NO: 63 |
| WP_001040105.1 | type II CRISPR RNA-guided endonuclease Cas9 [Streptococcus agalactiae] | SEQ ID NO: 64 |
| WP_001040106.1 | type II CRISPR RNA-guided endonuclease Cas9 [Streptococcus agalactiae] | SEQ ID NO: 65 |
| WP_001040107.1 | type II CRISPR RNA-guided endonuclease Cas9 [Streptococcus agalactiae] | SEQ ID NO: 66 |
| WP_001040108.1 | type II CRISPR RNA-guided endonuclease Cas9 [Streptococcus agalactiae] | SEQ ID NO: 67 |
| WP_001040109.1 | type II CRISPR RNA-guided endonuclease Cas9 [Streptococcus agalactiae] | SEQ ID NO: 68 |
| WP_001040110.1 | type II CRISPR RNA-guided endonuclease Cas9 [Streptococcus agalactiae] | SEQ ID NO: 69 |
| WP_015058523.1 | type II CRISPR RNA-guided endonuclease Cas9 [Streptococcus agalactiae] | SEQ ID NO: 70 |
| WP_017643650.1 | type II CRISPR RNA-guided endonuclease Cas9 [Streptococcus agalactiae] | SEQ ID NO: 71 |
| WP_017647151.1 | type II CRISPR RNA-guided endonuclease Cas9 [Streptococcus agalactiae] | SEQ ID NO: 72 |
| WP_017648376.1 | type II CRISPR RNA-guided endonuclease Cas9 [Streptococcus agalactiae] | SEQ ID NO: 73 |
| WP_017649527.1 | type II CRISPR RNA-guided endonuclease Cas9 [Streptococcus agalactiae] | SEQ ID NO: 74 |
| WP_017771611.1 | type II CRISPR RNA-guided endonuclease Cas9 [Streptococcus agalactiae] | SEQ ID NO: 75 |
| WP_017771984.1 | type II CRISPR RNA-guided endonuclease Cas9 [Streptococcus agalactiae] | SEQ ID NO: 76 |
| CFQ25032.1 | CRISPR-associated protein [Streptococcus agalactiae] | SEQ ID NO: 77 |
| CFV16040.1 | CRISPR-associated protein [Streptococcus agalactiae] | SEQ ID NO: 78 |
| KLJ37842.1 | CRISPR-associated protein Csn1 [Streptococcus agalactiae] | SEQ ID NO: 79 |
| KLJ72361.1 | CRISPR-associated protein Csn1 [Streptococcus agalactiae] | SEQ ID NO: 80 |
| KLL20707.1 | CRISPR-associated protein Csn1 [Streptococcus agalactiae] | SEQ ID NO: 81 |
| KLL42645.1 | CRISPR-associated protein Csn1 [Streptococcus agalactiae] | SEQ ID NO: 82 |
| WP_047207273.1 | type II CRISPR RNA-guided endonuclease Cas9 [Streptococcus agalactiae] | SEQ ID NO: 83 |
| WP_047209694.1 | type II CRISPR RNA-guided endonuclease Cas9 [Streptococcus agalactiae] | SEQ ID NO: 84 |
| WP_050198062.1 | type II CRISPR RNA-guided endonuclease Cas9 [Streptococcus agalactiae] | SEQ ID NO: 85 |
| WP_050201642.1 | type II CRISPR RNA-guided endonuclease Cas9 [Streptococcus agalactiae] | SEQ ID NO: 86 |
| WP_050204027.1 | type II CRISPR RNA-guided endonuclease Cas9 [Streptococcus agalactiae] | SEQ ID NO: 87 |
| WP_050881965.1 | type II CRISPR RNA-guided endonuclease Cas9 [Streptococcus agalactiae] | SEQ ID NO: 88 |
| WP_050886065.1 | type II CRISPR RNA-guided endonuclease Cas9 [Streptococcus agalactiae] | SEQ ID NO: 89 |
| AHN30376.1 | CRSPR-associated protein Csn1 [Streptococcus agalactiae 138P] | SEQ ID NO: 90 |
| EAO78426.1 | reticulocyte binding protein [Streptococcus agalactiae H36B] | SEQ ID NO: 91 |
| CCW42055.1 | CRISPR-associated protein, SAG0894 family [Streptococcus agalactiae ILRI112] | SEQ ID NO: 92 |
| WP_003041502.1 | type II CRISPR RNA-guided endonuclease Cas9 [Streptococcus anginosus] | SEQ ID NO: 93 |
| WP_037593752.1 | type II CRISPR RNA-guided endonuclease Cas9 [Streptococcus anginosus] | SEQ ID NO: 94 |
| WP_049516684.1 | CRISPR-associated protein Csn1 [Streptococcus anginosus] | SEQ ID NO: 95 |
| GAD46167.1 | hypothetical protein ANG6_0662 [Streptococcus anginosus T5] | SEQ ID NO: 96 |
| WP_018363470.1 | type II CRISPR RNA-guided endonuclease Cas9 [Streptococcus caballi] | SEQ ID NO: 97 |
| WP_003043819.1 | type II CRISPR RNA-guided endonuclease Cas9 [Streptococcus canis] | SEQ ID NO: 98 |
| WP_006269658.1 | type II CRISPR RNA-guided endonuclease Cas9 [Streptococcus constellatus] | SEQ ID NO: 99 |
| WP_048800889.1 | type II CRISPR RNA-guided endonuclease Cas9 [Streptococcus constellatus] | SEQ ID NO: 100 |
| WP_012767106.1 | type II CRISPR RNA-guided endonuclease Cas9 [Streptococcus dysgalactiae] | SEQ ID NO: 101 |
| WP_014612333.1 | type II CRISPR RNA-guided endonuclease Cas9 [Streptococcus dysgalactiae] | SEQ ID NO: 102 |
| WP_015017095.1 | type II CRISPR RNA-guided endonuclease Cas9 [Streptococcus dysgalactiae] | SEQ ID NO: 103 |
| WP_015057649.1 | type II CRISPR RNA-guided endonuclease Cas9 [Streptococcus dysgalactiae] | SEQ ID NO: 104 |
| WP_048327215.1 | type II CRISPR RNA-guided endonuclease Cas9 [Streptococcus dysgalactiae] | SEQ ID NO: 105 |
| WP_049519324.1 | CRISPR-associated protein Csn1 [Streptococcus dysgalactiae] | SEQ ID NO: 106 |
| WP_012515931.1 | type II CRISPR RNA-guided endonuclease Cas9 [Streptococcus equi] | SEQ ID NO: 107 |
| WP_021320964.1 | type II CRISPR RNA-guided endonuclease Cas9 [Streptococcus equi] | SEQ ID NO: 108 |
| WP_037581760.1 | type II CRISPR RNA-guided endonuclease Cas9 [Streptococcus equi] | SEQ ID NO: 109 |
| WP_004232481.1 | type II CRISPR RNA-guided endonuclease Cas9 [Streptococcus equinus] | SEQ ID NO: 110 |
| WP_009854540.1 | type II CRISPR RNA-guided endonuclease Cas9 [Streptococcus gallolyticus] | SEQ ID NO: 111 |
| WP_012962174.1 | type II CRISPR RNA-guided endonuclease Cas9 [Streptococcus gallolyticus] | SEQ ID NO: 112 |
| WP_039695303.1 | type II CRISPR RNA-guided endonuclease Cas9 [Streptococcus gallolyticus] | SEQ ID NO: 113 |
| WP_014334983.1 | type II CRISPR RNA-guided endonuclease Cas9 [Streptococcus infantarius] | SEQ ID NO: 114 |
| WP_003099269.1 | type II CRISPR RNA-guided endonuclease Cas9 [Streptococcus iniae] | SEQ ID NO: 115 |
| AHY15608.1 | CRISPR-associated protein Csn1 [Streptococcus iniae] | SEQ ID NO: 116 |
| AHY17476.1 | CRISPR-associated protein Csn1 [Streptococcus iniae] | SEQ ID NO: 117 |
| ESR09100.1 | hypothetical protein IUSA1_08595 [Streptococcus iniae IUSA1] | SEQ ID NO: 118 |
| AGM98575.1 | CRISPR-associated protein Cas9/Csn1, subtype II/NMEMI [Streptococcus iniae SF1] | SEQ ID NO: 119 |
| ALF27331.1 | CRISPR-associated protein Csn1 [Streptococcus intermedius] | SEQ ID NO: 120 |
| WP_018372492.1 | type II CRISPR RNA-guided endonuclease Cas9 [Streptococcus massiliensis] | SEQ ID NO: 121 |
| WP_045618028.1 | type II CRISPR RNA-guided endonuclease Cas9 [Streptococcus mitis] | SEQ ID NO: 122 |
| WP_045635197.1 | type II CRISPR RNA-guided endonuclease Cas9 [Streptococcus mitis] | SEQ ID NO: 123 |
| WP_002263549.1 | type II CRISPR RNA-guided endonuclease Cas9 [Streptococcus mutans] | SEQ ID NO: 124 |
| WP_002263887.1 | type II CRISPR RNA-guided endonuclease Cas9 [Streptococcus mutans] | SEQ ID NO: 125 |
| WP_002264920.1 | type II CRISPR RNA-guided endonuclease Cas9 [Streptococcus mutans] | SEQ ID NO: 126 |
| WP_002269043.1 | type II CRISPR RNA-guided endonuclease Cas9 [Streptococcus mutans] | SEQ ID NO: 127 |
| WP_002269448.1 | type II CRISPR RNA-guided endonuclease Cas9 [Streptococcus mutans] | SEQ ID NO: 128 |
| WP_002271977.1 | type II CRISPR RNA-guided endonuclease Cas9 [Streptococcus mutans] | SEQ ID NO: 129 |
| WP_002272766.1 | type II CRISPR RNA-guided endonuclease Cas9 [Streptococcus mutans] | SEQ ID NO: 130 |
| WP_002273241.1 | type II CRISPR RNA-guided endonuclease Cas9 [Streptococcus mutans] | SEQ ID NO: 131 |
| WP_002275430.1 | type II CRISPR RNA-guided endonuclease Cas9 [Streptococcus mutans] | SEQ ID NO: 132 |
| WP_002276448.1 | type II CRISPR RNA-guided endonuclease Cas9 [Streptococcus mutans] | SEQ ID NO: 133 |
| WP_002277050.1 | type II CRISPR RNA-guided endonuclease Cas9 [Streptococcus mutans] | SEQ ID NO: 134 |
| WP_002277364.1 | type II CRISPR RNA-guided endonuclease Cas9 [Streptococcus mutans] | SEQ ID NO: 135 |
| WP_002279025.1 | type II CRISPR RNA-guided endonuclease Cas9 [Streptococcus mutans] | SEQ ID NO: 136 |
| WP_002279859.1 | type II CRISPR RNA-guided endonuclease Cas9 [Streptococcus mutans] | SEQ ID NO: 137 |
| WP_002280230.1 | type II CRISPR RNA-guided endonuclease Cas9 [Streptococcus mutans] | SEQ ID NO: 138 |
| WP_002281696.1 | type II CRISPR RNA-guided endonuclease Cas9 [Streptococcus mutans] | SEQ ID NO: 139 |
| WP_002282247.1 | type II CRISPR RNA-guided endonuclease Cas9 [Streptococcus mutans] | SEQ ID NO: 140 |
| WP_002282906.1 | type II CRISPR RNA-guided endonuclease Cas9 [Streptococcus mutans] | SEQ ID NO: 141 |
| WP_002283846.1 | type II CRISPR RNA-guided endonuclease Cas9 [Streptococcus mutans] | SEQ ID NO: 142 |
| WP_002287255.1 | type II CRISPR RNA-guided endonuclease Cas9 [Streptococcus mutans] | SEQ ID NO: 143 |
| WP_002288990.1 | type II CRISPR RNA-guided endonuclease Cas9 [Streptococcus mutans] | SEQ ID NO: 144 |
| WP_002289641.1 | type II CRISPR RNA-guided endonuclease Cas9 [Streptococcus mutans] | SEQ ID NO: 145 |
| WP_002290427.1 | type II CRISPR RNA-guided endonuclease Cas9 [Streptococcus mutans] | SEQ ID NO: 146 |
| WP_002295753.1 | type II CRISPR RNA-guided endonuclease Cas9 [Streptococcus mutans] | SEQ ID NO: 147 |
| WP_002296423.1 | type II CRISPR RNA-guided endonuclease Cas9 [Streptococcus mutans] | SEQ ID NO: 148 |
| WP_002304487.1 | type II CRISPR RNA-guided endonuclease Cas9 [Streptococcus mutans] | SEQ ID NO: 149 |
| WP_002305844.1 | type II CRISPR RNA-guided endonuclease Cas9 [Streptococcus mutans] | SEQ ID NO: 150 |
| WP_002307203.1 | type II CRISPR RNA-guided endonuclease Cas9 [Streptococcus mutans] | SEQ ID NO: 151 |
| WP_002310390.1 | type II CRISPR RNA-guided endonuclease Cas9 [Streptococcus mutans] | SEQ ID NO: 152 |
| WP_002352408.1 | type II CRISPR RNA-guided endonuclease Cas9 [Streptococcus mutans] | SEQ ID NO: 153 |
| WP_012997688.1 | type II CRISPR RNA-guided endonuclease Cas9 [Streptococcus mutans] | SEQ ID NO: 154 |
| WP_014677909.1 | type II CRISPR RNA-guided endonuclease Cas9 [Streptococcus mutans] | SEQ ID NO: 155 |
| WP_019312892.1 | type II CRISPR RNA-guided endonuclease Cas9 [Streptococcus mutans] | SEQ ID NO: 156 |
| WP_019313659.1 | type II CRISPR RNA-guided endonuclease Cas9 [Streptococcus mutans] | SEQ ID NO: 157 |
| WP_019314093.1 | type II CRISPR RNA-guided endonuclease Cas9 [Streptococcus mutans] | SEQ ID NO: 158 |
| WP_019315370.1 | type II CRISPR RNA-guided endonuclease Cas9 [Streptococcus mutans] | SEQ ID NO: 159 |
| WP_019803776.1 | type II CRISPR RNA-guided endonuclease Cas9 [Streptococcus mutans] | SEQ ID NO: 160 |
| WP_019805234.1 | type II CRISPR RNA-guided endonuclease Cas9 [Streptococcus mutans] | SEQ ID NO: 161 |
| WP_024783594.1 | type II CRISPR RNA-guided endonuclease Cas9 [Streptococcus mutans] | SEQ ID NO: 162 |
| WP_024784288.1 | type II CRISPR RNA-guided endonuclease Cas9 [Streptococcus mutans] | SEQ ID NO: 163 |
| WP_024784666.1 | type II CRISPR RNA-guided endonuclease Cas9 [Streptococcus mutans] | SEQ ID NO: 164 |
| WP_024784894.1 | type II CRISPR RNA-guided endonuclease Cas9 [Streptococcus mutans] | SEQ ID NO: 165 |
| WP_024786433.1 | type II CRISPR RNA-guided endonuclease Cas9 [Streptococcus mutans] | SEQ ID NO: 166 |
| WP_049473442.1 | CRISPR-associated protein Csn1 [Streptococcus mutans] | SEQ ID NO: 167 |
| WP_049474547.1 | CRISPR-associated protein Csn1 [Streptococcus mutans] | SEQ ID NO: 168 |
| EMC03581.1 | hypothetical protein SMU69_09359 [Streptococcus mutans NLML4] | SEQ ID NO: 169 |
| WP_000428612.1 | type II CRISPR RNA-guided endonuclease Cas9 [Streptococcus oralis] | SEQ ID NO: 170 |
| WP_000428613.1 | type II CRISPR RNA-guided endonuclease Cas9 [Streptococcus oralis] | SEQ ID NO: 171 |
| WP_049523028.1 | CRISPR-associated protein Csn1 [Streptococcus parasanguinis] | SEQ ID NO: 172 |
| WP_003107102.1 | type II CRISPR RNA-guided endonuclease Cas9 [Streptococcus parauberis] | SEQ ID NO: 173 |
| WP_054279288.1 | type II CRISPR RNA-guided endonuclease Cas9 [Streptococcus phocae] | SEQ ID NO: 174 |
| WP_049531101.1 | CRISPR-associated protein Csn1 [Streptococcus pseudopneumoniae] | SEQ ID NO: 175 |
| WP_049538452.1 | CRISPR-associated protein Csn1 [Streptococcus pseudopneumoniae] | SEQ ID NO: 176 |
| WP_049549711.1 | CRISPR-associated protein Csn1 [Streptococcus pseudopneumoniae] | SEQ ID NO: 177 |
| WP_007896501.1 | type II CRISPR RNA-guided endonuclease Cas9 [Streptococcus pseudoporcinus] | SEQ ID NO: 178 |
| EFR44625.1 | CRISPR-associated protein, Csn1 family [Streptococcus pseudoporcinus SPIN 20026] | SEQ ID NO: 179 |
| WP_002897477.1 | type II CRISPR RNA-guided endonuclease Cas9 [Streptococcus sanguinis] | SEQ ID NO: 180 |
| WP_002906454.1 | type II CRISPR RNA-guided endonuclease Cas9 [Streptococcus sanguinis] | SEQ ID NO: 181 |
| WP_009729476.1 | type II CRISPR RNA-guided endonuclease Cas9 [Streptococcus sp. F0441] | SEQ ID NO: 182 |
| CQR24647.1 | CRISPR-associated protein [Streptococcus sp. FF10] | SEQ ID NO: 183 |
| WP_000066813.1 | type II CRISPR RNA-guided endonuclease Cas9 [Streptococcus sp. M334] | SEQ ID NO: 184 |
| WP_009754323.1 | type II CRISPR RNA-guided endonuclease Cas9 [Streptococcus sp. taxon 056] | SEQ ID NO: 185 |
| WP_044674937.1 | type II CRISPR RNA-guided endonuclease Cas9 [Streptococcus suis] | SEQ ID NO: 186 |
| WP_044676715.1 | type II CRISPR RNA-guided endonuclease Cas9 [Streptococcus suis] | SEQ ID NO: 187 |
| WP_044680361.1 | type II CRISPR RNA-guided endonuclease Cas9 [Streptococcus suis] | SEQ ID NO: 188 |
| WP_044681799.1 | type II CRISPR RNA-guided endonuclease Cas9 [Streptococcus suis] | SEQ ID NO: 189 |
| WP_049533112.1 | CRISPR-associated protein Csn1 [Streptococcus suis] | SEQ ID NO: 190 |
| WP_029090905.1 | type II CRISPR RNA-guided endonuclease Cas9 [Brochothrix thermosphacta] | SEQ ID NO: 191 |
| WP_006506696.1 | type II CRISPR RNA-guided endonuclease Cas9 [Catenibacterium mitsuokai] | SEQ ID NO: 192 |
| AIT42264.1 | Cas9hc:NLS: HA [Cloning vector pYB196] | SEQ ID NO: 193 |
| WP_034440723.1 | type II CRISPR endonuclease Cas9 [Clostridiales bacterium S5-A11] | SEQ ID NO: 194 |
| AKQ21048.1 | Cas9 [CRISPR-mediated gene targeting vector p (bhsp68-Cas9)] | SEQ ID NO: 195 |
| WP_004636532.1 | type II CRISPR RNA-guided endonuclease Cas9 [Dolosigranulum pigrum] | SEQ ID NO: 196 |
| WP_002364836.1 | MULTISPECIES: type II CRISPR RNA-guided endonuclease Cas9 [Enterococcus] | SEQ ID NO: 197 |
| WP_016631044.1 | MULTISPECIES: type II CRISPR RNA-guided endonuclease Cas9 [Enterococcus] | SEQ ID NO: 198 |
| EMS75795.1 | hypothetical protein H318_06676 [Enterococcus durans IPLA 655] | SEQ ID NO: 199 |
| WP_002373311.1 | type II CRISPR RNA-guided endonuclease Cas9 [Enterococcus faecalis] | SEQ ID NO: 200 |
| WP_002378009.1 | type II CRISPR RNA-guided endonuclease Cas9 [Enterococcus faecalis] | SEQ ID NO: 201 |
| WP_002407324.1 | type II CRISPR RNA-guided endonuclease Cas9 [Enterococcus faecalis] | SEQ ID NO: 202 |
| WP_002413717.1 | type II CRISPR RNA-guided endonuclease Cas9 [Enterococcus faecalis] | SEQ ID NO: 203 |
| WP_010775580.1 | type II CRISPR RNA-guided endonuclease Cas9 [Enterococcus faecalis] | SEQ ID NO: 204 |
| WP_010818269.1 | type II CRISPR RNA-guided endonuclease Cas9 [Enterococcus faecalis] | SEQ ID NO: 205 |
| WP_010824395.1 | type II CRISPR RNA-guided endonuclease Cas9 [Enterococcus faecalis] | SEQ ID NO: 206 |
| WP_016622645.1 | type II CRISPR RNA-guided endonuclease Cas9 [Enterococcus faecalis] | SEQ ID NO: 207 |
| WP_033624816.1 | type II CRISPR RNA-guided endonuclease Cas9 [Enterococcus faecalis] | SEQ ID NO: 208 |
| WP_033625576.1 | type II CRISPR RNA-guided endonuclease Cas9 [Enterococcus faecalis] | SEQ ID NO: 209 |
| WP_033789179.1 | type II CRISPR RNA-guided endonuclease Cas9 [Enterococcus faecalis] | SEQ ID NO: 210 |
| WP_002310644.1 | type II CRISPR RNA-guided endonuclease Cas9 [Enterococcus faecium] | SEQ ID NO: 211 |
| WP_002312694.1 | type II CRISPR RNA-guided endonuclease Cas9 [Enterococcus faecium] | SEQ ID NO: 212 |
| WP_002314015.1 | type II CRISPR RNA-guided endonuclease Cas9 [Enterococcus faecium] | SEQ ID NO: 213 |
| WP_002320716.1 | type II CRISPR RNA-guided endonuclease Cas9 [Enterococcus faecium] | SEQ ID NO: 214 |
| WP_002330729.1 | type II CRISPR RNA-guided endonuclease Cas9 [Enterococcus faecium] | SEQ ID NO: 215 |
| WP_002335161.1 | type II CRISPR RNA-guided endonuclease Cas9 [Enterococcus faecium] | SEQ ID NO: 216 |
| WP_002345439.1 | type II CRISPR RNA-guided endonuclease Cas9 [Enterococcus faecium] | SEQ ID NO: 217 |
| WP_034867970.1 | type II CRISPR RNA-guided endonuclease Cas9 [Enterococcus faecium] | SEQ ID NO: 218 |
| WP_047937432.1 | type II CRISPR RNA-guided endonuclease Cas9 [Enterococcus faecium] | SEQ ID NO: 219 |
| WP_010720994.1 | type II CRISPR RNA-guided endonuclease Cas9 [Enterococcus hirae] | SEQ ID NO: 220 |
| WP_010737004.1 | type II CRISPR RNA-guided endonuclease Cas9 [Enterococcus hirae] | SEQ ID NO: 221 |
| WP_034700478.1 | type II CRISPR RNA-guided endonuclease Cas9 [Enterococcus hirae] | SEQ ID NO: 222 |
| WP_007209003.1 | type II CRISPR RNA-guided endonuclease Cas9 [Enterococcus italicus] | SEQ ID NO: 223 |
| WP_023519017.1 | type II CRISPR RNA-guided endonuclease Cas9 [Enterococcus mundtii] | SEQ ID NO: 224 |
| WP_010770040.1 | type II CRISPR RNA-guided endonuclease Cas9 [Enterococcus phoeniculicola] | SEQ ID NO: 225 |
| WP_048604708.1 | type II CRISPR RNA-guided endonuclease Cas9 [Enterococcus sp. AM1] | SEQ ID NO: 226 |
| WP_010750235.1 | type II CRISPR RNA-guided endonuclease Cas9 [Enterococcus villorum] | SEQ ID NO: 227 |
| AII16583.1 | Cas9 endonuclease [Expression vector pCas9] | SEQ ID NO: 228 |
| WP_029073316.1 | type II CRISPR RNA-guided endonuclease Cas9 [Kandleria vitulina] | SEQ ID NO: 229 |
| WP_031589969.1 | type II CRISPR RNA-guided endonuclease Cas9 [Kandleria vitulina] | SEQ ID NO: 230 |
| KDA45870.1 | CRISPR-associated protein Cas9/Csn1, subtype II/NMEMI [Lactobacillus animalis] | SEQ ID NO: 231 |
| WP_039099354.1 | type II CRISPR RNA-guided endonuclease Cas9 [Lactobacillus curvatus] | SEQ ID NO: 232 |
| AKP02966.1 | hypothetical protein ABB45_04605 [Lactobacillus farciminis] | SEQ ID NO: 233 |
| WP_010991369.1 | type II CRISPR RNA-guided endonuclease Cas9 [Listeria innocua] | SEQ ID NO: 234 |
| WP_033838504.1 | type II CRISPR RNA-guided endonuclease Cas9 [Listeria innocua] | SEQ ID NO: 235 |
| EHN60060.1 | CRISPR-associated protein, Csn1 family [Listeria innocua ATCC 33091] | SEQ ID NO: 236 |
| EFR89594.1 | crispr-associated protein, Csn1 family [Listeria innocua FSL S4-378] | SEQ ID NO: 237 |
| WP_038409211.1 | type II CRISPR RNA-guided endonuclease Cas9 [Listeria ivanovii] | SEQ ID NO: 238 |
| EFR95520.1 | crispr-associated protein Csn1 [Listeria ivanovii FSL F6-596] | SEQ ID NO: 239 |
| WP_003723650.1 | type II CRISPR RNA-guided endonuclease Cas9 [Listeria monocytogenes] | SEQ ID NO: 240 |
| WP_003727705.1 | type II CRISPR RNA-guided endonuclease Cas9 [Listeria monocytogenes] | SEQ ID NO: 241 |
| WP_003730785.1 | type II CRISPR RNA-guided endonuclease Cas9 [Listeria monocytogenes] | SEQ ID NO: 242 |
| WP_003733029.1 | type II CRISPR RNA-guided endonuclease Cas9 [Listeria monocytogenes] | SEQ ID NO: 243 |
| WP_003739838.1 | type II CRISPR RNA-guided endonuclease Cas9 [Listeria monocytogenes] | SEQ ID NO: 244 |
| WP_014601172.1 | type II CRISPR RNA-guided endonuclease Cas9 [Listeria monocytogenes] | SEQ ID NO: 245 |
| WP_023548323.1 | type II CRISPR RNA-guided endonuclease Cas9 [Listeria monocytogenes] | SEQ ID NO: 246 |
| WP_031665337.1 | type II CRISPR RNA-guided endonuclease Cas9 [Listeria monocytogenes] | SEQ ID NO: 247 |
| WP_031669209.1 | type II CRISPR RNA-guided endonuclease Cas9 [Listeria monocytogenes] | SEQ ID NO: 248 |
| WP_033920898.1 | type II CRISPR RNA-guided endonuclease Cas9 [Listeria monocytogenes] | SEQ ID NO: 249 |
| AKI42028.1 | CRISPR-associated protein [Listeria monocytogenes] | SEQ ID NO: 250 |
| AKI50529.1 | CRISPR-associated protein [Listeria monocytogenes] | SEQ ID NO: 251 |
| EFR83390.1 | crispr-associated protein Csn1 [Listeria monocytogenes FSL F2-208] | SEQ ID NO: 252 |
| WP_046323366.1 | type II CRISPR RNA-guided endonuclease Cas9 [Listeria seeligeri] | SEQ ID NO: 253 |
| AKE81011.1 | Cas9 [Plant multiplex genome editing vector pYLCRISPR/Cas9Pubi-H] | SEQ ID NO: 254 |
| CUO82355.1 | Uncharacterized protein conserved in bacteria [Roseburia hominis] | SEQ ID NO: 255 |
| WP_033162887.1 | type II CRISPR RNA-guided endonuclease Cas9 [Sharpea azabuensis] | SEQ ID NO: 256 |
| AGZ01981.1 | Cas9 endonuclease [synthetic construct] | SEQ ID NO: 257 |
| AKA60242.1 | nuclease deficient Cas9 [synthetic construct] | SEQ ID NO: 258 |
| AKS40380.1 | Cas9 [Synthetic plasmid pFC330] | SEQ ID NO: 259 |
| 4UN5_B | Cas9, Chain B, Crystal Structure | SEQ ID NO: 260 |

[0263] Non-Limiting Examples of Suitable Deaminase Domains are Provided.

Human AID
(SEQ ID NO: 270)
[sequence omitted]
(underline: nuclear localization signal;
double underline: nuclear export signal)
Mouse AID
(SEQ ID NO: 271)
MDSLLMKQKKFLYHFKNVRWAKGRHETYLCYVVKRRDSATSCSLDFGHLR
NKSGCHVELLFLRYISDWDLDPGRCYRVTWFTSWSPCYDCARHVAEFLRW
NPNLSLRIFTARLYFCEDRKAEPEGLRRLHRAGVQIGIMTFKDYFYCWNT
FVENRERTFKAWEGLHENSVRLTRQLRRILLPLYEVDDLRDAFRMLGF
(underline: nuclear localization signal;
double underline: nuclear export signal)
Dog AID
(SEQ ID NO: 272)
MDSLLMKQRKFLYHFKNVRWAKGRHETYLCYVVKRRDSATSFSLDFGHLR
NKSGCHVELLFLRYISDWDLDPGRCYRVTWFTSWSPCYDCARHVADFLRG
YPNLSLRIFAARLYFCEDRKAEPEGLRRLHRAGVQIAIMTFKDYFYCWNT
FVENREKTFKAWEGLHENSVRLSRQLRRILLPLYEVDDLRDAFRTLGL
(underline: nuclear localization signal;
double underline: nuclear export signal)
Bovine AID
(SEQ ID NO: 273)
MDSLLKKQRQFLYQFKNVRWAKGRHETYLCYVVKRRDSPTSFSLDFGHLR
NKAGCHVELLFLRYISDWDLDPGRCYRVTWFTSWSPCYDCARHVADFLRG
YPNLSLRIFTARLYFCDKERKAEPEGLRRLHRAGVQIAIMTFKDYFYCWN
TFVENHERTFKAWEGLHENSVRLSRQLRRILLPLYEVDDLRDAFRTLGL
(underline: nuclear localization signal;
double underline: nuclear export signal)
Mouse APOBEC-3
(SEQ ID NO: 274)
MGPFCLGCSHRKCYSPIRNLISQETFKFHFKNLGYAKGRKDTFLCYEVTR
KDCDSPVSLHHGVFKNKDNIHAEICFLYWFHDKVLKVLSPREEFKITWYM
SWSPCFECAEQIVRFLATHHNLSLDIFSSRLYNVQDPETQQNLCRLVQEG
AQVAAMDLYEFKKCWKKFVDNGGRRFRPWKRLLTNFRYQDSKLQEILRPC
YIPVPSSSSSTLSNICLTKGLPETRFCVEGRRMDPLSEEEFYSQFYNQRV
KHLCYYHRMKPYLCYQLEQFNGQAPLKGCLLSEKGKQHAEILFLDKIRSM
ELSQVTITCYLTWSPCPNCAWQLAAFKRDRPDLILHIYTSRLYFHWKRPF
QKGLCSLWQSGILVDVMDLPQFTDCWTNFVNPKRPFWPWKGLEIISRRTQ
RRLRRIKESWGLQDLVNDFGNLQLGPPMS
(italic: nucleic acid editing domain)
Rat APOBEC-3
(SEQ ID NO: 275)
MGPFCLGCSHRKCYSPIRNLISQETFKFHFKNLRYAIDRKDTFLCYEVTR
KDCDSPVSLHHGVFKNKDNIHAEICFLYWFHDKVLKVLSPREEFKITWYM
SWSPCFECAEQVLRFLATHHNLSLDIFSSRLYNIRDPENQQNLCRLVQEG
AQVAAMDLYEFKKCWKKFVDNGGRRFRPWKKLLTNFRYQDSKLQEILRPC
YIPVPSSSSSTLSNICLTKGLPETRFCVERRRVHLLSEEEFYSQFYNQRV
KHLCYYHGVKPYLCYQLEQFNGQAPLKGCLLSEKGKQHAEILFLDKIRSM
ELSQVIITCYLTWSPCPNCAWQLAAFKRDRPDLILHIYTSRLYFHWKRPF
QKGLCSLWQSGILVDVMDLPQFTDCWTNFVNPKRPFWPWKGLEIISRRTQ
RRLHRIKESWGLQDLVNDFGNLQLGPPMS
(italic: nucleic acid editing domain)
Rhesus macaque APOBEC-3G
(SEQ ID NO: 276)
MVEPMDPRTFVSNFNNRPILSGLNTVWLCCEVKTKDPSGPPLDAKIFQGK
VYSKAKYHPEMRFLRWFHKWRQLHHDQEYKVTWYVSWSPCTRCANSVATF
LAKDPKVTLTIFVARLYYFWKPDYQQALRILCQKRGGPHATMKIMNYNEF
QDCWNKFVDGRGKPFKPRNNLPKHYTLLQATLGELLRHLMDPGTFTSNFN
NKPWVSGQHETYLCYKVERLHNDTWVPLNQHRGFLRNQAPNIHGFPKGRH
AELCFLDLIPFWKLDGQQYRWCFTSWSPCFSCAQEMAKFISNNEHVSLCI
FAARIYDDQGRYQEGLRALHRDGAKIAMMNYSEFEYCWDTFVDRQGRPFQ
PWDGLDEHSQALSGRLRAI
(italic: nucleic acid editing domain;
underline: cytoplasmic localization signal)
Chimpanzee APOBEC-3G
(SEQ ID NO: 277)
MKPHFRNPVERMYQDTFSDNFYNRPILSHRNTVWLCYEVKTKGPSRPPLD
AKIFRGQVYSKLKYHPEMRFFHWFSKWRKLHRDQEYEVTWYISWSPCTKC
TRDVATFLAEDPKVTLTIFVARLYYFWDPDYQEALRSLCQKRDGPRATMK
IMNYDEFQHCWSKFVYSQRELFEPWNNLPKYYILLHIMLGEILRHSMDPP
TFTSNFNNELWVRGRHETYLCYEVERLHNDTWVLLNQRRGFLCNQAPHKH
GFLEGRHAELCFLDVIPFWKLDLHQDYRWCFTSWSPCFSCAQEMAKFISN
NKHVSLCIFAARIYDDQGRCQEGLRTLAKAGAKISIMTYSEFKHCWDTFV
DHQGCPFQPWDGLEEHSQALSGRLRAILQNQGN
(italic: nucleic acid editing domain;
underline: cytoplasmic localization signal)
Green monkey APOBEC-3G
(SEQ ID NO: 278)
MNPQIRNMVEQMEPDIFVYYFNNRPILSGRNTVWLCYEVKTKDPSGPPLD
ANIFQGKLYPEAKDHPEMKFLHWFRKWRQLHRDQEYEVTWYVSWSPCTRC
ANSVATFLAEDPKVTLTIFVARLYYFWKPDYQQALRILCQERGGPHATMK
IMNYNEFQHCWNEFVDGQGKPFKPRKNLPKHYTLLHATLGELLRHVMDPG
TFTSNFNNKPWVSGQRETYLCYKVERSHNDTWVLLNQHRGFLRNQAPDRH
GFPKGRHAELCFLDLIPFWKLDDQQYRVTCFTSWSPCFSCAQKMAKFISN
NKHVSLCIFAARIYDDQGRCQEGLRTLHRDGAKIAVMNYSEFEYCWDTFV
DRQGRPFQPWDGLDEHSQALSGRLRAI
(italic: nucleic acid editing domain;
underline: cytoplasmic localization signal)
Human APOBEC-3G
(SEQ ID NO: 279)
MKPHFRNTVERMYRDTFSYNFYNRPILSRRNTVWLCYEVKTKGPSRPPLD
AKIFRGQVYSELKYHPEMRFFHWFSKWRKLHRDQEYEVTWYISWSPCTKC
TRDMATFLAEDPKVTLTIFVARLYYFWDPDYQEALRSLCQKRDGPRATMK
IMNYDEFQHCWSKFVYSQRELFEPWNNLPKYYILLHIMLGEILRHSMDPP
TFTFNFNNEPWVRGRHETYLCYEVERMHNDTWVLLNQRRGFLCNQAPHKH
GFLEGRHAELCFLDVIPFWKLDLDQDYRVTCFTSWSPCFSCAQEMAKFIS
KNKHVSLCIFTARIYDDQGRCQEGLRTLAEAGAKISIMTYSEFKHCWDTF
VDHQGCPFQPWDGLDEHSQDLSGRLRAILQNQEN
(italic: nucleic acid editing domain;
underline: cytoplasmic localization signal)
Human APOBEC-3F
(SEQ ID NO: 280)
MKPHFRNTVERMYRDTFSYNFYNRPILSRRNTVWLCYEVKTKGPSRPRLD
AKIFRGQVYSQPEHHAEMCFLSWFCGNQLPAYKCFQITWFVSWTPCPDCV
AKLAEFLAEHPNVTLTISAARLYYYWERDYRRALCRLSQAGARVKIMDDE
EFAYCWENFVYSEGQPFMPWYKFDDNYAFLHRTLKEILRNPMEAMYPHIF
YFHFKNLRKAYGRNESWLCFTMEVVKHHSPVSWKRGVFRNQVDPETHCHA
ERCFLSWFCDDILSPNTNYEVTWYTSWSPCPECAGEVAEFLARHSNVNLT
IFTARLYYFWDTDYQEGLRSLSQEGASVEIMGYKDFKYCWENFVYNDDEP
FKPWKGLKYNFLFLDSKLQEILE
(italic: nucleic acid editing domain)
Human APOBEC-3B
(SEQ ID NO: 281)
MNPQIRNPMERMYRDTFYDNFENEPILYGRSYTWLCYEVKIKRGRSNLLW
DTGVFRGQVYFKPQYHAEMCFLSWFCGNQLPAYKCFQITWFVSWTPCPDC
VAKLAEFLSEHPNVTLTISAARLYYYWERDYRRALCRLSQAGARVTIMDY
EEFAYCWENFVYNEGQQFMPWYKFDENYAFLHRTLKEILRYLMDPDTFTF
NFNNDPLVLRRRQTYLCYEVERLDNGTWVLMDQHMGFLCNEAKNLLCGFY
GRHAELRFLDLVPSLQLDPAQIYRVTWFISWSPCFSWGCAGEVRAFLQEN
THVRLRIFAARIYDYDPLYKEALQMLRDAGAQVSIMTYDEPEYCWDTFVY
RQGCPFQPWDGLEEHSQALSGRLRAILQNQGN
(italic: nucleic acid editing domain)
Human APOBEC-3C:
(SEQ ID NO: 282)
MNPQIRNPMKAMYPGTFYFQFKNLWEANDRNETWLCFTVEGIKRRSVVSW
KTGVFRNQVDSETHCHAERCFLSWFCDDILSPNTKYQVTWYTSWSPCPDC
AGEVAEFLARHSNVNLTIFTARLYYFQYPCYQEGLRSLSQEGVAVEIMDY
EDFKYCWENFVYNDNEPFKPWKGLKTNFRLLKRRLRESLQ
(italic: nucleic acid editing domain)
Human APOBEC-3A:
(SEQ ID NO: 283)
MEASPASGPRHLMDPHIFTSNFNNGIGRHKTYLCYEVERLDNGTSVKMDQ
HRGFLHNQAKNLLCGFYGRHAELRFLDLVPSLQLDPAQIYRVTWFISWSP
CFSWGCAGEVRAFLQENTHVRLRIFAARIYDYDPLYKEALQMLRDAGAQV
SIMTYDEFKHCWDTFVDHQGCPFQPWDGLDEHSQALSGRLRAILQNQGN
(italic: nucleic acid editing domain)
Human APOBEC-3H:
(SEQ ID NO: 284)
MALLTAETFRLQFNNKRRLRRPYYPRKALLCYQLTPQNGSTPTRGYFENK
KKCHAEICHNEIKSMGLDETQCYQVTCYLTWSPCSSCAWELVDFIKAHDH
LNLGIFASRLYYHWCKPQQKGLRLLCGSQVPVEVMGFPKFADCWENFVDH
EKPLSFNPYKMLEELDKNSRAIKRRLERIKIPGVRAQGRYMDILCDAEV
(italic: nucleic acid editing domain)
Human APOBEC-3D
(SEQ ID NO: 285)
MNPQIRNPMERMYRDTFYDNFENEPILYGRSYTWLCYEVKIKRGRSNLLW
DTGVFRGPVLPKRQSNHRQEVYFRFENHAEMCFLSWFCGNRLPANRRFQI
TWFVSWNPCLPCVVKVTKFLAEHPNVTLTISAARLYYYRDRDWRWVLLRL
HKAGARVKIMDYEDFAYCWENFVCNEGQPFMPWYKFDDNYASLHRTLKEI
LRNPMEAMYPHIFYFHFKNLLKACGRNESWLCFTMEVTKHHSAVFRKRGV
FRNQVDPETHCHAERCFLSWFCDDILSPNTNYEVTWYTSWSPCPECAGEV
AEFLARHSNVNLTIFTARLCYFWDTDYQEGLCSLSQEGASVKIMGYKDFV
SCWKNFVYSDDEPFKPWKGLQTNFRLLKRRLREILQ
(italic: nucleic acid editing domain)
Human APOBEC-1
(SEQ ID NO: 286)
MTSEKGPSTGDPTLRRRIEPWEFDVFYDPRELRKEACLLYEIKWGMSRKI
WRSSGKNTTNHVEVNFIKKFTSERDFHPSMSCSITWFLSWSPCWECSQAI
REFLSRHPGVTLVIYVARLFWHMDQQNRQGLRDLVNSGVTIQIMRASEYY
HCWRNFVNYPPGDEAHWPQYPPLWMMLYALELHCIILSLPPCLKISRRWQ
NHLTFFRLHLQNCHYQTIPPHILLATGLIHPSVAWR
Mouse APOBEC-1
(SEQ ID NO: 287)
MSSETGPVAVDPTLRRRIEPHEFEVFFDPRELRKETCLLYEINWGGRHSV
WRHTSQNTSNHVEVNFLEKFTTERYFRPNTRCSITWFLSWSPCGECSRAI
TEFLSRHPYVTLFIYIARLYHHTDQRNRQGLRDLISSGVTIQIMTEQEYC
YCWRNFVNYPPSNEAYWPRYPHLWVKLYVLELYCIILGLPPCLKILRRKQ
PQLTFFTITLQTCHYQRIPPHLLWATGLK
Rat APOBEC-1
(SEQ ID NO: 288)
[sequence omitted]
Petromyzon marinus CDA1 (pmCDA1)
(SEQ ID NO: 289)
MTDAEYVRIHEKLDIYTFKKQFFNNKKSVSHRCYVLFELKRRGERRACFW
GYAVNKPQSGTERGIHAEIFSIRKVEEYLRDNPGQFTINWYSSWSPCADC
AEKILEWYNQELRGNGHTLKIWACKLYYEKNARNQIGLWNLRDNGVGLNV
MVSEHYQCCRKIFIQSSHNQLNENRWLEKTLKRAEKRRSELSIMIQVKIL
HTTKSPAV
Human APOBEC3G D316R_D317R
(SEQ ID NO: 290)
MKPHFRNTVERMYRDTFSYNFYNRPILSRRNTVWLCYEVKTKGPSRPPLD
AKIFRGQVYSELKYHPEMRFFHWFSKWRKLHRDQEYEVTWYISWSPCTKC
TRDMATFLAEDPKVTLTIFVARLYYFWDPDYQEALRSLCQKRDGPRATMK
IMNYDEFQHCWSKFVYSQRELFEPWNNLPKYYILLHIMLGEILRHSMDPP
TFTFNFNNEPWVRGRHETYLCYEVERMHNDTWVLLNQRRGFLCNQAPHKH
GFLEGRHAELCFLDVIPFWKLDLDQDYRVTCFTSWSPCFSCAQEMAKFIS
KNKHVSLCIFTARIYRRQGRCQEGLRTLAEAGAKISIMTYSEFKHCWDTF
VDHQGCPFQPWDGLDEHSQDLSGRLRAILQNQEN
Human APOBEC3G chain A
(SEQ ID NO: 291)
MDPPTFTFNFNNEPWVRGRHETYLCYEVERMHNDTWVLLNQRRGFLCNQA
PHKHGFLEGRHAELCFLDVIPFWKLDLDQDYRVTCFTSWSPCFSCAQEMA
KFISKNKHVSLCIFTARIYDDQGRCQEGLRTLAEAGAKISIMTYSEFKHC
WDTFVDHQGCPFQPWDGLDEHSQDLSGRLRAILQ
Human APOBEC3G chain A D120R_D121R
(SEQ ID NO: 292)
MDPPTFTFNFNNEPWVRGRHETYLCYEVERMHNDTWVLLNQRRGFLCNQA
PHKHGFLEGRHAELCFLDVIPFWKLDLDQDYRVTCFTSWSPCFSCAQEMA
KFISKNKHVSLCIFTARIYRRQGRCQEGLRTLAEAGAKISIMTYSEFKHC
WDTFVDHQGCPFQPWDGLDEHSQDLSGRLRAILQ

[0264] Non-Limiting Examples of Fusion Proteins/Nucleobase Editors are Provided.

His₆-rAPOBEC1-XTEN-dCas9 for Escherichia coli expression
(SEQ ID NO: 293)
MGSSHHHHHHMSSETGPVAVDPTLRRRIEPHEFEVFFDPRELRKETCLLYEINWGGRHSIWRHTSQNTNK
HVEVNFIEKFTTERYFCPNTRCSITWFLSWSPCGECSRAITEFLSRYPHVTLFIYIARLYHHADPRNRQG
LRDLISSGVTIQIMTEQESGYCWRNFVNYSPSNEAHWPRYPHLWVRLYVLELYCIILGLPPCLNILRRKQ
PQLTFFTIALQSCHYQRLPPHILWATGLKSGSETPGTSESATPESDKKYSIGLAIGTNSVGWAVITDEYK
VPSKKFKVLGNTDRHSIKKNLIGALLFDSGETALATRLKRTARRRYTRRKNRICYLQEIFSNEMAKVDDS
FFHRLEESFLVEEDKKHERHPIFGNIVDEVAYHEKYPTIYHLRKKLVDSTDKADLRLIYLALAHMIKFRG
HFLIEGDLNPDNSDVDKLFIQLVQTYNQLFEENPINASGVDAKAILSARLSKSRRLENLIAQLPGEKKNI
GLFGNLIALSLGLTPNFKSNFDLAEDAKLQLSKDTYDDDLDNLLAQIGDQYADLFLAAKNLSDAILLSDI
LRVNTEITKAPLSASMIKRYDEHHQDLTLLKALVRQQLPEKYKEIFFDQSKNGYAGYIDGGASQLEFYKF
IKPILEKMDGTEELLVKLNREDLLRKQRTFDNGSIPHQIHLGELHAILRRQEDFYPFLKDNREKIEKILT
FRIPYYVGPLARGNSRFAWMTRKSEETITPWNFEEVVDKGASAQSFIERMTNFDKNLPNEKVLPKHSLLY
EYFTVYNELTKVKYVTEGMRKPAFLSGEQKKAIVDLLFKTNRKVTVKQLKEDYFKKIECFDSVEISGVED
RFNASLGTYHDLLKIIKDKDFLDNEENEDILEDIVLTLTLFEDREMIEERLKTYAHLFDDKVMKQLKRRR
YTGWGRLSRKLINGIRDKQSGKTILDFLKSDGFANRNFMQLIHDDSLTFKEDIQKAQVSGQGDSLHEHIA
NLAGSPAIKKGILQTVKVVDELVKVMGRHKPENIVIEMARENQTTQKGQKNSRERMKRIEEGIKELGSQI
LKEHPVENTQLQNEKLYLYYLQNGRDMYVDQELDINRLSDYDVDAIVPQSFLKDDSIDNKVLTRSDKNRG
KSDNVPSEEVVKKMKNYWRQLLNAKLITQRKFDNLTKAERGGLSELDKAGFIKRQLVETRQITKHVAQIL
DSRMNTKYDENDKLIREVKVITLKSKLVSDFRKDFQFYKVREINNYHHAHDAYLNAVVGTALIKKYPKLE
SEFVYGDYKVYDVRKMIAKSEQEIGKATAKYFFYSNIMNFFKTEITLANGEIRKRPLIETNGETGEIVWD
KGRDFATVRKVLSMPQVNIVKKTEVQTGGFSKESILPKRNSDKLIARKKDWDPKKYGGFDSPTVAYSVLV
VAKVEKGKSKKLKSVKELLGITIMERSSFEKNPIDFLEAKGYKEVKKDLIIKLPKYSLFELENGRKRMLA
ESAGELQKGNELALPSKYVNFLYLASHYEKLKGSPEDNQKQLFVEQHKHYLDEIIEQISEFSKRVILADA
NLDKVLSAYNKHRDKPIREQAENIIHLFTLTNLGAPAAFKYFDTTIDRKRYTSTKEVLDATLIHQSITGL
YETRIDLSQLGGDSGGSPKKKRKV
rAPOBEC1-XTEN-dCas9-NLS for Mammalian expression
(SEQ ID NO: 294)
MSSETGPVAVDPTLRRRIEPHEFEVFFDPRELRKETCLLYEINWGGRHSIWRHTSQNTNKHVEVNFIEKF
TTERYFCPNTRCSITWFLSWSPCGECSRAITEFLSRYPHVTLFIYIARLYHHADPRNRQGLRDLISSGVT
IQIMTEQESGYCWRNFVNYSPSNEAHWPRYPHLWVRLYVLELYCIILGLPPCLNILRRKQPQLTFFTIAL
QSCHYQRLPPHILWATGLKSGSETPGTSESATPESDKKYSIGLAIGTNSVGWAVITDEYKVPSKKFKVLG
NTDRHSIKKNLIGALLFDSGETAEATRLKRTARRRYTRRKNRICYLQEIFSNEMAKVDDSFFHRLEESFL
VEEDKKHERHPIFGNIVDEVAYHEKYPTIYHLRKKLVDSTDKADLRLIYLALAHMIKFRGHFLIEGDLNP
DNSDVDKLFIQLVQTYNQLFEENPINASGVDAKAILSARLSKSRRLENLIAQLPGEKKNGLFGNLIALSL
GLTPNFKSNFDLAEDAKLQLSKDTYDDDLDNLLAQIGDQYADLFLAAKNLSDAILLSDILRVNTEITKAP
LSASMIKRYDEHHQDLTLLKALVRQQLPEKYKEIFFDQSKNGYAGYIDGGASQLEFYKFIKPILEKMDGT
EELLVKLNREDLLRKQRTFDNGSIPHQIHLGELHAILRRQEDFYPFLKDNREKIEKILTFRIPYYVGPLA
RGNSRFAWMTRKSEETITPWNFEEVVDKGASAQSFIERMTNFDKNLPNEKVLPKHSLLYEYFTVYNELTK
VKYVTEGMRKPAFLSGEQKKAIVDLLFKTNRKVTVKQLKEDYFKKIECFDSVEISGVEDRFNASLGTYHD
LLKIIKDKDFLDNEENEDILEDIVLTLTLFEDREMIEERLKTYAHLFDDKVMKQLKRRRYTGWGRLSRKL
INGIRDKQSGKTILDFLKSDGFANRNFMQLIHDDSLTFKEDIQKAQVSGQGDSLHEHIANLAGSPAIKKG
ILQTVKVVDELVKVMGRHKPENIVIEMARENQTTQKGQKNSRERMKRIEEGIKELGSQILKEHPVENTQL
QNEKLYLYYLQNGRDMYVDQELDINRLSDYDVDAIVPQSFLKDDSIDNKVLTRSDKNRGKSDNVPSEEVV
KKMKNYWRQLLNAKLITQRKFDNLTKAERGGLSELDKAGFIKRQLVETRQITKHVAQILDSRMNTKYDEN
DKLIREVKVITLKSKLVSDFRKDFQFYKVREINNYHHAHDAYLNAVVGTALIKKYPKLESEFVYGDYKVY
DVRKMIAKSEQEIGKATAKYFFYSNIMNFFKTEITLANGEIRKRPLIETNGETGEIVWDKGRDFATVRKV
LSMPQVNIVKKTEVQTGGFSKESILPKRNSDKLIARKKDWDPKKYGGFDSPTVAYSVLVVAKVEKGKSKK
LKSVKELLGITIMERSSFEKNPIDFLEAKGYKEVKKDLIIKLPKYSLFELENGRKRMLASAGELQKGNEL
ALPSKYVNFLYLASHYEKLKGSPEDNEQKQLFVEQHKHYLDEIIEQISEFSKRVILADANLDKVLSAYNK
HRDKPIREQAENIIHLFTLTNLGAPAAFKYFDTTIDRKRYTSTKEVLDATLIHQSITGLYETRIDLSQLG
GDSGGSPKKKRKV
hAPOBEC1-XTEN-dCas9-NLS for Mammalian expression
(SEQ ID NO: 295)
MTSEKGPSTGDPTLRRRIEPWEFDVFYDPRELRKEACLLYEIKWGMSRKIWRSSGKNTTNHVEVNFIKKF
TSERDFHPSMSCSITWFLSWSPCWECSQAIREFLSRHPGVTLVIYVARLFWHMDQQNRQGLRDLVNSGVT
IQIMRASEYYHCWRNFVNYPPGDEAHWPQYPPLWMMLYALELHCIILSLPPCLKISRRWQNHLTFFRLHL
QNCHYQTIPPHILLATGLIHPSVAWRSGSETPGTSESATPESDKKYSIGLAIGTNSVGWAVITDEYKVPS
KKFKVLGNTDRHSIKKNLIGALLFDSGETALATRLKRTARRRYTRRKNRICYLQEIFSNEMAKVDDSFFH
RLEESFLVEEDKKHERHPIFGNIVDEVAYHEKYPTIYHLRKKLVDSTDKADLRLIYLALAHMIKFRGHFL
IEGDLNPDNSDVDKLFIQLVQTYNQLFEENPINASGVDAKAILSARLSKSRRLENLIAQLPGEKKNGLFG
NLIALSLGLTPNFKSNFDLAEDAKLQLSKDTYDDDLDNLLAQIGDQYADLFLAAKNLSDAILLSDILRVN
TEITKAPLSASMIKRYDEHHQDLTLLKALVRQQLPEKYKEIFFDQSKNGYAGYIDGGASQLEFYKFIKPI
LEKMDGTEELLVKLNREDLLRKQRTFDNGSIPHQIHLGELHAILRRQEDFYPFLKDNREKIEKILTFRIP
YYVGPLARGNSRFAWMTRKSEETITPWNFEEVVDKGASAQSFIERMTNFDKNLPNEKVLPKHSLLYEYFT
VYNELTKVKYVTEGMRKPAFLSGEQKKAIVDLLFKTNRKVTVKQLKEDYFKKIECFDSVEISGVEDRFNA
SLGTYHDLLKIIKDKDFLDNEENEDILEDIVLTLTLFEDREMIEERLKTYAHLFDDKVMKQLKRRRYTGW
GRLSRKLINGIRDKQSGKTILDFLKSDGFANRNFMQLIHDDSLTFKEDIQKAQVSGQGDSLHEHIANLAG
SPAIKKGILQTVKVVDELVKVMGRHKPENIVIEMARENQTTQKGQKNSRERMKRIEEGIKELGSQILKEH
PVENTQLQNEKLYLYYLQNGRDMYVDQELDINRLSDYDVDAIVPQSFLKDDSIDNKVLTRSDKNRGKSDN
VPSEEVVKKMKNYWRQLLNAKLITQRKFDNLTKAERGGLSELDKAGFIKRQLVETRQITKHVAQILDSRM
NTKYDENDKLIREVKVITLKSKLVSDFRKDFQFYKVREINNYHHAHDAYLNAVVGTALIKKYPKLESEFV
YGDYKVYDVRKMIAKSEQEIGKATAKYFFYSNIMNFFKTEITLANGEIRKRPLIETNGETGEIVWDKGRD
FATVRKVLSMPQVNIVKKTEVQTGGFSKESILPKRNSDKLIARKKDWDPKKYGGFDSPTVAYSVLVVAKV
EKGKSKKLKSVKELLGITIMERSSFEKNPIDFLEAKGYKEVKKDLIIKLPKYSLFELENGRKRMLASAGE
LQKGNELALPSKYVNFLYLASHYEKLKGSPEDNEQKQLFVEQHKHYLDEIIEQISEFSKRVILADANLDK
VLSAYNKHRDKPIREQAENIIHLFTLTNLGAPAAFKYFDTTIDRKRYTSTKEVLDATLIHQSITGLYETR
IDLSQLGGDSGGSPKKKRKV
rAPOBEC1-XTEN-dCas9-UGI-NLS
(SEQ ID NO: 296)
MSSETGPVAVDPTLRRRIEPHEFEVFFDPRELRKETCLLYEINWGGRHSIWRHTSQNTNKHVEVNFIEKF
TTERYFCPNTRCSITWFLSWSPCGECSRAITEFLSRYPHVTLFIYIARLYHHADPRNRQGLRDLISSGVT
IQIMTEQESGYCWRNFVNYSPSNEAHWPRYPHLWVRLYVLELYCIILGLPPCLNILRRKQPQLTFFTIAL
QSCHYQRLPPHILWATGLKSGSETPGTSESATPESDKKYSIGLAIGTNSVGWAVITDEYKVPSKKFKVLG
NTDRHSIKKNLIGALLFDSGETAEATRLKRTARRRYTRRKNRICYLQEIFSNEMAKVDDSFFHRLEESFL
VEEDKKHERHPIFGNIVDEVAYHEKYPTIYHLRKKLVDSTDKADLRLIYLALAHMIKFRGHFLIEGDLNP
DNSDVDKLFIQLVQTYNQLFEENPINASGVDAKAILSARLSKSRRLENLIAQLPGEKKNGLFGNLIALSL
GLTPNFKSNFDLAEDAKLQLSKDTYDDDLDNLLAQIGDQYADLFLAAKNLSDAILLSDILRVNTEITKAP
LSASMIKRYDEHHQDLTLLKALVRQQLPEKYKEIFFDQSKNGYAGYIDGGASQLEFYKFIKPILEKMDGT
EELLVKLNREDLLRKQRTFDNGSIPHQIHLGELHAILRRQEDFYPFLKDNREKIEKILTFRIPYYVGPLA
RGNSRFAWMTRKSEETITPWNFEEVVDKGASAQSFIERMTNFDKNLPNEKVLPKHSLLYEYFTVYNELTK
VKYVTEGMRKPAFLSGEQKKAIVDLLFKTNRKVTVKQLKEDYFKKIECFDSVEISGVEDRFNASLGTYHD
LLKIIKDKDFLDNEENEDILEDIVLTLTLFEDREMIEERLKTYAHLFDDKVMKQLKRRRYTGWGRLSRKL
INGIRDKQSGKTILDFLKSDGFANRNFMQLIHDDSLTFKEDIQKAQVSGQGDSLHEHIANLAGSPAIKKG
ILQTVKVVDELVKVMGRHKPENIVIEMARENQTTQKGQKNSRERMKRIEEGIKELGSQILKEHPVENTQL
QNEKLYLYYLQNGRDMYVDQELDINRLSDYDVDAIVPQSFLKDDSIDNKVLTRSDKNRGKSDNVPSEEVV
KKMKNYWRQLLNAKLITQRKFDNLTKAERGGLSELDKAGFIKRQLVETRQITKHVAQILDSRMNTKYDEN
DKLIREVKVITLKSKLVSDFRKDFQFYKVREINNYHHAHDAYLNAVVGTALIKKYPKLESEFVYGDYKVY
DVRKMIAKSEQEIGKATAKYFFYSNIMNFFKTEITLANGEIRKRPLIETNGETGEIVWDKGRDFATVRKV
LSMPQVNIVKKTEVQTGGFSKESILPKRNSDKLIARKKDWDPKKYGGFDSPTVAYSVLVVAKVEKGKSKK
LKSVKELLGITIMERSSFEKNPIDFLEAKGYKEVKKDLIIKLPKYSLFELENGRKRMLASAGELQKGNEL
ALPSKYVNFLYLASHYEKLKGSPEDNEQKQLFVEQHKHYLDEIIEQISEFSKRVILADANLDKVLSAYNK
HRDKPIREQAENIIHLFTLTNLGAPAAFKYFDTTIDRKRYTSTKEVLDATLIHQSITGLYETRIDLSQLG
GDSGGSTNLSDIIEKETGKQLVIQESILMLPEEVEEVIGNKPESDILVHTAYDESTDENVMLLTSDAPEY
KPWALVIQDSNGENKIKMLSGGSPKKKRKV
rAPOBEC1-XTEN-Cas9 nickase-UGI-NLS
(BE3, SEQ ID NO: 297)
MSSETGPVAVDPTLRRRIEPHEFEVFFDPRELRKETCLLYEINWGGRHSIWRHTSQNTNKHVEVNFIEKF
TTERYFCPNTRCSITWFLSWSPCGECSRAITEFLSRYPHVTLFIYIARLYHHADPRNRQGLRDLISSGVT
IQIMTEQESGYCWRNFVNYSPSNEAHWPRYPHLWVRLYVLELYCIILGLPPCLNILRRKQPQLTFFTIAL
QSCHYQRLPPHILWATGLKSGSETPGTSESATPESDKKYSIGLAIGTNSVGWAVITDEYKVPSKKFKVLG
NTDRHSIKKNLIGALLFDSGETAEATRLKRTARRRYTRRKNRICYLQEIFSNEMAKVDDSFFHRLEESFL
VEEDKKHERHPIFGNIVDEVAYHEKYPTIYHLRKKLVDSTDKADLRLIYLALAHMIKFRGHFLIEGDLNP
DNSDVDKLFIQLVQTYNQLFEENPINASGVDAKAILSARLSKSRRLENLIAQLPGEKKNGLFGNLIALSL
GLTPNFKSNFDLAEDAKLQLSKDTYDDDLDNLLAQIGDQYADLFLAAKNLSDAILLSDILRVNTEITKAP
LSASMIKRYDEHHQDLTLLKALVRQQLPEKYKEIFFDQSKNGYAGYIDGGASQLEFYKFIKPILEKMDGT
EELLVKLNREDLLRKQRTFDNGSIPHQIHLGELHAILRRQEDFYPFLKDNREKIEKILTFRIPYYVGPLA
RGNSRFAWMTRKSEETITPWNFEEVVDKGASAQSFIERMTNFDKNLPNEKVLPKHSLLYEYFTVYNELTK
VKYVTEGMRKPAFLSGEQKKAIVDLLFKTNRKVTVKQLKEDYFKKIECFDSVEISGVEDRFNASLGTYHD
LLKIIKDKDFLDNEENEDILEDIVLTITLFEDREMIEERLKTYAHLFDDKVMKQLKRRRYTGWGRLSRKL
INGIRDKQSGKTILDFLKSDGFANRNFMQLIHDDSLTFKEDIQKAQVSGQGDSLHEHIANLAGSPAIKKG
ILQTVKVVDELVKVMGRHKPENIVIEMARENQTTQKGQKNSRERMKRIEEGIKELGSQILKEHPVENTQL
QNEKLYLYYLQNGRDMYVDQELDINRLSDYDVDHIVPQSFLKDDSIDNKVLTRSDKNRGKSDNVPSEEVV
KKMKNYWRQLLNAKLITQRKFDNLTKAERGGLSELDKAGFIKRQLVETRQITKHVAQILDSRMNTKYDEN
DKLIREVKVITLKSKLVSDFRKDFQFYKVREINNYHHAHDAYLNAVVGTALIKKYPKLESEFVYGDYKVY
DVRKMIAKSEQEIGKATAKYFFYSNIMNFFKTEITLANGEIRKRPLIETNGETGEIVWDKGRDFATVRKV
LSMPQVNIVKKTEVQTGGFSKESILPKRNSDKLIARKKDWDPKKYGGFDSPTVAYSVLVVAKVEKGKSKK
LKSVKELLGITIMERSSFEKNPIDFLEAKGYKEVKKDLIIKLPKYSLFELENGRKRMLASAGELQKGNEL
ALPSKYVNFLYLASHYEKLKGSPEDNEQKQLFVEQHKHYLDEIIEQISEFSKRVILADANLDKVLSAYNK
HRDKPIREQAENIIHLFTLTNLGAPAAFKYFDTTIDRKRYTSTKEVLDATLIHQSITGLYETRIDLSQLG
GDSGGSTNLSDIIEKETGKQLVIQESILMLPEEVEEVIGNKPESDILVHTAYDESTDENVMLLTSDAPEY
KPWALVIQDSNGENKIKMLSGGSPKKKRKV
pmCDA1-XTEN-dCas9-UGI (bacteria)
(SEQ ID NO: 298)
MTDAEYVRIHEKLDIYTFKKQFFNNKKSVSHRCYVLFELKRRGERRACFWGYAVNKPQSGTERGIHAEIF
SIRKVEEYLRDNPGQFTINWYSSWSPCADCAEKILEWYNQELRGNGHTLKIWACKLYYEKNARNQIGLWN
LRDNGVGLNVMVSEHYQCCRKIFIQSSHNQLNENRWLEKTLKRAEKRRSELSIMIQVKILHTTKSPAVSG
SETPGTSESATPESDKKYSIGLAIGTNSVGWAVITDEYKVPSKKFKVLGNTDRHSIKKNLIGALLFDSGE
TAEATRLKRTARRRYTRRKNRICYLQEIFSNEMAKVDDSFFHRLEESFLVEEDKKHERHPIFGNIVDEVA
YHEKYPTIYHLRKKLVDSTDKADLRLIYLALAHMIKFRGHFLIEGDLNPDNSDVDKLFIQLVQTYNQLFE
ENPINASGVDAKAILSARLSKSRRLENLIAQLPGEKKNGLFGNLIALSLGLTPNFKSNFDLAEDAKLQLS
KDTYDDDLDNLLAQIGDQYADLFLAAKNLSDAILLSDILRVNTEITKAPLSASMIKRYDEHHQDLTLLKA
LVRQQLPEKYKEIFFDQSKNGYAGYIDGGASQEEFYKFIKPILEKMDGTEELLVKLNREDLLRKQRTFDN
GSIPHQIHLGELHAILRRQEDFYPFLKDNREKIEKILTFRIPYYVGPLARGNSRFAWMTRKSEETITPWN
FEEVVDKGASAQSFIERMTNFDKNLPNEKVLPKHSLLYEYFTVYNELTKVKYVTEGMRKPAFLSGEQKKA
IVDLLFKTNRKVTVKQLKEDYFKKIECFDSVEISGVEDRFNASLGTYHDLLKIIKDKDFLDNEENEDILE
DIVLTLTLFEDREMIEERLKTYAHLFDDKVMKQLKRRRYTGWGRLSRKLINGIRDKQSGKTILDFLKSDG
FANRNFMQLIHDDSLTFKEDIQKAQVSGQGDSLHEHIANLAGSPAIKKGILQTVKVVDELVKVMGRHKPE
NIVIEMARENQTTQKGQKNSRERMKRIEEGIKELGSQILKEHPVENTQLQNEKLYLYYLQNGRDMYVDQE
LDINRLSDYDVDAIVPQSFLKDDSIDNKVLTRSDKNRGKSDNVPSEEVVKKMKNYWRQLLNAKLITQRKF
DNLTKAERGGLSELDKAGFIKRQLVETRQITKHVAQILDSRMNTKYDENDKLIREVKVITLKSKLVSDFR
KDFQFYKVREINNYHHAHDAYLNAVVGTALIKKYPKLESEFVYGDYKVYDVRKMIAKSEQEIGKATAKYF
FYSNIMNFFKTEITLANGEIRKRPLIETNGETGEIVWDKGRDFATVRKVLSMPQVNIVKKTEVQTGGFSK
ESILPKRNSDKLIARKKDWDPKKYGGFDSPTVAYSVLVVAKVEKGKSKKLKSVKELLGITIMERSSFEKN
PIDFLEAKGYKEVKKDLIIKLPKYSLFELENGRKRMLASAGELQKGNELALPSKYVNFLYLASHYEKLKG
SPEDNEQKQLFVEQHKHYLDEIIEQISEFSKRVILADANLDKVLSAYNKHRDKPIREQAENIIHLFTLTN
LGAPAAFKYFDTTIDRKRYTSTKEVLDATLIHQSITGLYETRIDLSQLGGDSGGSMTNLSDIIEKETGKQ
LVIQESILMLPEEVEEVIGNKPESDILVHTAYDESTDENVMLLTSDAPEYKPWALVIQDSNGENKIKML
pmCDA1-XTEN-nCas9-UGI-NLS (mammalian construct) (SEQ ID NO: 299):
MTDAEYVRIHEKLDIYTFKKQFFNNKKSVSHRCYVLFELKRRGERRACFWGYAVNKPQSGTERGIHAEIF
SIRKVEEYLRDNPGQFTINWYSSWSPCADCAEKILEWYNQELRGNGHTLKIWACKLYYEKNARNQIGLWN
LRDNGVGLNVMVSEHYQCCRKIFIQSSHNQLNENRWLEKTLKRAEKRRSELSIMIQVKILHTTKSPAVSG
SETPGTSESATPESDKKYSIGLAIGTNSVGWAVITDEYKVPSKKFKVLGNTDRHSIKKNLIGALLFDSGE
TAEATRLKRTARRRYTRRKNRICYLQEIFSNEMAKVDDSFFHRLEESFLVEEDKKHERHPIFGNIVDEVA
YHEKYPTIYHLRKKLVDSTDKADLRLIYLALAHMIKFRGHFLIEGDLNPDNSDVDKLFIQLVQTYNQLFE
ENPINASGVDAKAILSARLSKSRRLENLIAQLPGEKKNGLFGNLIALSLGLTPNFKSNFDLAEDAKLQLS
KDTYDDDLDNLLAQIGDQYADLFLAAKNLSDAILLSDILRVNTEITKAPLSASMIKRYDEHHQDLTLLKA
LVRQQLPEKYKEIFFDQSKNGYAGYIDGGASQEEFYKFIKPILEKMDGTEELLVKLNREDLLRKQRTFDN
GSIPHQIHLGELHAILRRQEDFYPFLKDNREKIEKILTFRIPYYVGPLARGNSRFAWMTRKSEETITPWN
FEEVVDKGASAQSFIERMTNFDKNLPNEKVLPKHSLLYEYFTVYNELTKVKYVTEGMRKPAFLSGEQKKA
IVDLLFKTNRKVTVKQLKEDYFKKIECFDSVEISGVEDRFNASLGTYHDLLKIIKDKDFLDNEENEDILE
DIVLTLTLFEDREMIEERLKTYAHLFDDKVMKQLKRRRYTGWGRLSRKLINGIRDKQSGKTILDFLKSDG
FANRNFMQLIHDDSLTFKEDIQKAQVSGQGDSLHEHIANLAGSPAIKKGILQTVKVVDELVKVMGRHKPE
NIVIEMARENQTTQKGQKNSRERMKRIEEGIKELGSQILKEHPVENTQLQNEKLYLYYLQNGRDMYVDQE
LDINRLSDYDVDHIVPQSFLKDDSIDNKVLTRSDKNRGKSDNVPSEEVVKKMKNYWRQLLNAKLITQRKF
DNLTKAERGGLSELDKAGFIKRQLVETRQITKHVAQILDSRMNTKYDENDKLIREVKVITLKSKLVSDFR
KDFQFYKVREINNYHHAHDAYLNAVVGTALIKKYPKLESEFVYGDYKVYDVRKMIAKSEQEIGKATAKYF
FYSNIMNFFKTEITLANGEIRKRPLIETNGETGEIVWDKGRDFATVRKVLSMPQVNIVKKTEVQTGGFSK
ESILPKRNSDKLIARKKDWDPKKYGGFDSPTVAYSVLVVAKVEKGKSKKLKSVKELLGITIMERSSFEKN
PIDFLEAKGYKEVKKDLIIKLPKYSLFELENGRKRMLASAGELQKGNELALPSKYVNFLYLASHYEKLKG
SPEDNEQKQLFVEQHKHYLDEIIEQISEFSKRVILADANLDKVLSAYNKHRDKPIREQAENIIHLFTLTN
LGAPAAFKYFDTTIDRKRYTSTKEVLDATLIHQSITGLYETRIDLSQLGGDSGGSTNLSDIIEKETGKQL
VIQESILMLPEEVEEVIGNKPESDILVHTAYDESTDENVMLLTSDAPEYKPWALVIQDSNGENKIKMLSG
GSPKKKRKV
huAPOBEC3G-XTEN-dCas9-UGI (bacteria) (SEQ ID NO: 300)
MDPPTFTFNFNNEPWVRGRHETYLCYEVERMHNDTWVLLNQRRGFLCNQAPHKHGFLEGRHAELCFLDVI
PFWKLDLDQDYRVTCFTSWSPCFSCAQEMAKFISKNKHVSLCIFTARIYDDQGRCQEGLRTLAEAGAKIS
IMTYSEFKHCWDTFVDHQGCPFQPWDGLDEHSQDLSGRLRAILQSGSETPGTSESATPESDKKYSIGLAI
GTNSVGWAVITDEYKVPSKKFKVLGNTDRHSIKKNLIGALLFDSGETAEATRLKRTARRRYTRRKNRICY
LQEIFSNEMAKVDDSFFHRLEESFLVEEDKKHERHPIFGNIVDEVAYHEKYPTIYHLRKKLVDSTDKADL
RLIYLALAHMIKFRGHFLIEGDLNPDNSDVDKLFIQLVQTYNQLFEENPINASGVDAKAILSARLSKSRR
LENLIAQLPGEKKNGLFGNLIALSLGLTPNFKSNFDLAEDAKLQLSKDTYDDDLDNLLAQIGDQYADLFL
AAKNLSDAILLSDILRVNTEITKAPLSASMIKRYDEHHQDLTLLKALVRQQLPEKYKEIFFDQSKNGYAG
YIDGGASQEEFYKFIKPILEKMDGTEELLVKLNREDLLRKQRTFDNGSIPHQIHLGELHAILRRQEDFYP
FLKDNREKIEKILTFRIPYYVGPLARGNSRFAWMTRKSEETITPWNFEEVVDKGASAQSFIERMTNFDKN
LPNEKVLPKHSLLYEYFTVYNELTKVKYVTEGMRKPAFLSGEQKKAIVDLLFKTNRKVTVKQLKEDYFKK
IECFDSVETSGVEDRFNASLGTYHDLLKIIKDKDFLDNEENEDILEDIVLTLTLFEDREMIEERLKTYAH
LFDDKVMKQLKRRRYTGWGRLSRKLINGIRDKQSGKTILDFLKSDGFANRNFMQLIHDDSLTFKEDIQKA
QVSGQGDSLHEHIANLAGSPAIKKGILQTVKVVDELVKVMGRHKPENIVIEMARENQTTQKGQKNSRERM
KRIEEGIKELGSQILKEHPVENTQLQNEKLYLYYLQNGRDMYVDQELDINRLSDYDVDAIVPQSFLKDDS
IDNKVLTRSDKNRGKSDNVPSEEVVKKMKNYWRQLLNAKLITQRKFDNLTKAERGGLSELDKAGFIKRQL
VETRQITKHVAQILDSRMNTKYDENDKLIREVKVITLKSKLVSDFRKDFQFYKVREINNYHHAHDAYLNA
VVGTALIKKYPKLESEFVYGDYKVYDVRKMIAKSEQEIGKATAKYFFYSNIMNFFKTEITLANGEIRKRP
LIETNGETGEIVWDKGRDFATVRKVLSMPQVNIVKKTEVQTGGFSKESILPKRNSDKLIARKKDWDPKKY
GGFDSPTVAYSVLVVAKVEKGKSKKLKSVKELLGITIMERSSFEKNPIDFLEAKGYKEVKKDLIIKLPKY
SLFELENGRKRMLASAGELQKGNELALPSKYVNFLYLASHYEKLKGSPEDNEQKQLFVEQHKHYLDEIIE
QISEFSKRVILADANLDKVLSAYNKHRDKPIREQAENIIHLFTLTNLGAPAAFKYFDTTIDRKRYTSTKE
VLDATLIHQSITGLYETRIDLSQLGGDSGGSMTNLSDIIEKETGKQLVIQESILMLPEEVEEVIGNKPES
DILVHTAYDESTDENVMLLTSDAPEYKPWALVIQDSNGENKIKML
huAPOBEC3G-XTEN-nCas9-UGI-NLS (mammalian construct) (SEQ ID NO: 301)
MDPPTFTFNFNNEPWVRGRHETYLCYEVERMHNDTWVLLNQRRGFLCNQAPHKHGFLEGRHAELCFLDV
IPFWKLDLDQDYRVTCFTSWSPCFSCAQEMAKFISKNKHVSLCIFTARIYDDQGRCQEGLRTLAEAGAKI
SIMTYSEFKHCWDTFVDHQGCPFQPWDGLDEHSQDLSGRLRAILQSGSETPGTSESATPESDKKYSIGLA
IGTNSVGWAVITDEYKVPSKKFKVLGNTDRHSIKKNLIGALLFDSGETAEATRLKRTARRRYTRRKNRIC
YLQEIFSNEMAKVDDSFFHRLEESFLVEEDKKHERHPIFGNIVDEVAYHEKYPTIYHLRKKLVDSTDKAD
LRLIYLALAHMIKFRGHFLIEGDLNPDNSDVDKLFIQLVQTYNQLFEENPINASGVDAKAILSARLSKSR
RLENLIAQLPGEKKNGLFGNLIALSLGLTPNFKSNFDLAEDAKLQLSKDTYDDDLDNLLAQIGDQYADLF
LAAKNLSDAILLSDILRVNTEITKAPLSASMIKRYDEHHQDLTLLKALVRQQLPEKYKEIFFDQSKNGYA
GYIDGGASQEEFYKFIKPILEKMDGTEELLVKLNREDLLRKQRTFDNGSIPHQIHLGELHAILRRQEDFY
PFLKDNREKIEKILTFRIPYYVGPLARGNSRFAWMTRKSEETITPWNFEEVVDKGASAQSFIERMTNFDK
NLPNEKVLPKHSLLYEYFTVYNELTKVKYVTEGMRKPAFLSGEQKKAIVDLLFKTNRKVTVKQLKEDYFK
KIECFDSVETSGVEDRFNASLGTYHDLLKIIKDKDFLDNEENEDILEDIVLTLTLFEDREMIEERLKTYA
HLFDDKVMKQLKRRRYTGWGRLSRKLINGIRDKQSGKTILDFLKSDGFANRNFMQLIHDDSLTFKEDIQK
AQVSGQGDSLHEHIANLAGSPAIKKGILQTVKVVDELVKVMGRHKPENIVIEMARENQTTQKGQKNSRER
MKRIEEGIKELGSQILKEHPVENTQLQNEKLYLYYLQNGRDMYVDQELDINRLSDYDVDHIVPQSFLKDD
SIDNKVLTRSDKNRGKSDNVPSEEVVKKMKNYWRQLLNAKLITQRKFDNLTKAERGGLSELDKAGFIKRQ
LVETRQITKHVAQILDSRMNTKYDENDKLIREVKVITLKSKLVSDFRKDFQFYKVREINNYHHAHDAYLN
AVVGTALIKKYPKLESEFVYGDYKVYDVRKMIAKSEQEIGKATAKYFFYSNIMNFFKTEITLANGEIRKR
PLIETNGETGEIVWDKGRDFATVRKVLSMPQVNIVKKTEVQTGGFSKESILPKRNSDKLIARKKDWDPKK
YGGFDSPTVAYSVLVVAKVEKGKSKKLKSVKELLGITIMERSSFEKNPIDFLEAKGYKEVKKDLIIKLPK
YSLFELENGRKRMLASAGELQKGNELALPSKYVNFLYLASHYEKLKGSPEDNEQKQLFVEQHKHYLDEII
EQISEFSKRVILADANLDKVLSAYNKHRDKPIREQAENIIHLFTLTNLGAPAAFKYFDTTIDRKRYTSTK
EVLDATLIHQSITGLYETRIDLSQLGGDSGGSTNLSDIIEKETGKQLVIQESILMLPEEVEEVIGNKPES
DILVHTAYDESTDENVMLLTSDAPEYKPWALVIQDSNGENKIKMLSGGSPKKKRKV
huAPOBEC3G (D316R_D317R)-XTEN-nCas9-UGI-NLS (mammalian construct)
(SEQ ID NO: 302)
MDPPTFTFNFNNEPWVRGRHETYLCYEVERMHNDTWVLLNQRRGFLCNQAPHKHGFLEGRHAELCFLDVI
PFWKLDLDQDYRVTCFTSWSPCFSCAQEMAKFISKNKHVSLCIFTARIYRRQGRCQEGLRTLAEAGAKIS
IMTYSEFKHCWDTFVDHQGCPFQPWDGLDEHSQDLSGRLRAILQSGSETPGTSESATPESDKKYSIGLAI
GTNSVGWAVITDEYKVPSKKFKVLGNTDRHSIKKNLIGALLFDSGETALATRLKRTARRRYTRRKNRICY
LQEIFSNEMAKVDDSFFHRLEESFLVEEDKKHERHPIFGNIVDEVAYHEKYPTIYHLRKKLVDSTDKADL
RLIYLALAHMIKFRGHFLIEGDLNPDNSDVDKLFIQLVQTYNQLFEENPINASGVDAKAILSARLSKSRR
LENLIAQLPGEKKNIGLFGNLIALSLGLTPNFKSNFDLAEDAKLQLSKDTYDDDLDNLLAQIGDQYADLF
LAAKNLSDAILLSDILRVNTEITKAPLSASMIKRYDEHHQDLTLLKALVRQQLPEKYKEIFFDQSKNGYA
GYIDGGASQLEFYKFIKPILEKMDGTEELLVKLNREDLLRKQRTFDNGSIPHQIHLGELHAILRRQEDFY
PFLKDNREKIEKILTFRIPYYVGPLARGNSRFAWMTRKSEETITPWNFEEVVDKGASAQSFIERMTNFDK
NLPNEKVLPKHSLLYEYFTVYNELTKVKYVTEGMRKPAFLSGEQKKAIVDLLFKTNRKVTVKQLKEDYFK
KIECFDSVEISGVEDRFNASLGTYHDLLKIIKDKDFLDNEENEDILEDIVLTLTLFEDREMIEERLKTYA
HLFDDKVMKQLKRRRYTGWGRLSRKLINGIRDKQSGKTILDFLKSDGFANRNFMQLIHDDSLTFKEDIQK
AQVSGQGDSLHEHIANLAGSPAIKKGILQTVKVVDELVKVMGRHKPENIVIEMARENQTTQKGQKNSRER
MKRIEEGIKELGSQILKEHPVENTQLQNEKLYLYYLQNGRDMYVDQELDINRLSDYDVDHIVPQSFLKDD
SIDNKVLTRSDKNRGKSDNVPSEEVVKKMKNYWRQLLNAKLITQRKFDNLTKAERGGLSELDKAGFIKRQ
LVETRQITKHVAQILDSRMNTKYDENDKLIREVKVITLKSKLVSDFRKDFQFYKVREINNYHHAHDAYLN
AVVGTALIKKYPKLESEFVYGDYKVYDVRKMIAKSEQEIGKATAKYFFYSNIMNFFKTEITLANGEIRKR
PLIETNGETGEIVWDKGRDFATVRKVLSMPQVNIVKKTEVQTGGFSKESILPKRNSDKLIARKKDWDPKK
YGGFDSPTVAYSVLVVAKVEKGKSKKLKSVKELLGITIMERSSFEKNPIDFLEAKGYKEVKKDLIIKLPK
YSLFELENGRKRMLASAGELQKGNELALPSKYVNFLYLASHYEKLKGSPEDNEQKQLFVEQHKHYLDEII
EQISEFSKRVILADANLDKVLSAYNKHRDKPIREQAENIIHLFTLTNLGAPAAFKYFDTTIDRKRYTSTK
EVLDATLIHQSITGLYETRIDLSQLGGDSGGSTNLSDIIEKETGKQLVIQESILMLPEEVEEVIGNKPES
DILVHTAYDESTDENVMLLTSDAPEYKPWALVIQDSNGENKIKMLSGGSPKKKRKV

### Example 2: Genome/Base-Editing Methods for Modifying the CCR5 Receptor Gene to Protect Against HIV Infection

[0265] Disclosed herein are new ways for introducing novel engineered variants, as well as naturally-occurring allelic variants, of the co-receptor C-C Chemokine Receptor 5 (CCR5) that prevent or hinder cellular entry of the Human Immunodeficiency Virus (HIV). These methods include CRISPR-Cas9-based tools programmed by guide RNAs requiring either: (i) “base-editors” that catalyze chemical reactions on nucleobases (e.g., cytidine deaminase-Cas9 fusion, e.g. BE3¹); (ii) an engineered nuclease with DNA cutting activity (e.g., WT Cas9,² Cas9 nickases³ or Fok1-nuclease-dCas9 fusions⁴). The variants selected (FIG. 1, Tables 1-5) include residues that directly alter the affinity for the HIV coat protein and/or destabilize the CCR5 protein folding, which mimics the potentially curative effects of the CCR5Δ32 variant.⁵ Using a similar strategy, the intron-exon splicing junction adjacent to the open-reading frame of CCR5 can be altered to prevent the maturation and/or destabilize the mRNA transcript (FIGS. 2A to 2C, Table 2).

[0266] Subsequently, other natural protective variants may be identified in human populations that can be replicated in the same manner (FIG. 3. Tables 6 and 7). Moreover, new protective variants of CCR5 (Tables 8-10), and also CCR2,⁶ could be identified by treating cells in vitro with guide-RNA libraries designed for all possible PAMs in these gene, coupled with FACS sorting using reporters/labeling methods and DNA-deep sequencing, to find the guide-RNAs that programmed base-editing reactions that lower CCR5 protein expression, prevent gp120 binding, and/or hinder HIV entry into the cell. For example, engineered alterations to destabilize CCR5 may follow a simple design of switching hydrophobic to polar residues on the transmembrane helices (FIG. 1). The precisely-targeted methods for CCR5 modifications proposed herein are complementary to previous methods that create random indels in the CCR5 genomic site using engineered nucleases such as CRISPR/Cas9. TALEN, or zinc-finger nucleases in hematopoietic cells ex vivo.⁷ Moreover, “base-editors” such as BE3 may have a more favorable safety profile, due to the relatively low impact that off-target cytosine deamination has on genomic stability,⁸ including oncogene activation or tumor suppressor inactivation⁹.

### Example 3: Exemplary C to T Editing Demonstrating Modification of the CCR5 Receptor Gene to Generate Q186X and Q188X Stop Codons

[0267] C to T editing of CCR5 was performed in HEK293 cells using KKH-SaBE3 and guide-RNA Q186X-e [spacer sequence TACAGTCAGTATCAATTCTGG (SEQ ID NO: 735); PAM sequence: AAGAAT (SEQ ID NO: 736)]. The results from these experiments are shown in FIG. 5, panels A-C. The editing was calculated from total reads (MiSeq). FIG. 5, panel A demonstrates that significant editing was observed at position C7 and C13, both of which generate premature stop codons in tandem (Q186X and Q188X, see inset graphic of FIG. 5, panel A). The PAM sequence is shown as underlined and the last nucleotide of the protospacer is separated with a line. Raw data used for base-calling and calculating base-editing for KKH-BE3 and Q186X-e treated HEK293 cells is shown in FIG. 5, panel B. The indel percentage was 1.97%. FIG. 5, panel C shows raw data collected for untreated control cells.

TABLE 1
Introduction of HIV-protective naturally-occurring allelic variants of
CCR5 and CCR2 using genome/base-editing with APOBEC1-Cas9 tools (e.g. BE3¹).

| Known | Target | Genome-editing | Edited | Match/ | |
|---|---|---|---|---|---|
| variant | codon | reaction(s) | codon | mimic | Predicted outcome (ref) |
| CCR5 | GAT | 1^{st} base C→T on | AAT | Asparagine | Charge neutralized, unfolding, |
| (D2V) | | complementary strand | | (mimic) | and destabilization^{5c} |
| CCR5 | TGC | 2^{nd} base C→T on | TAC | Tyrosine | Lack of major disulfide bridge, |
| (C20S) | | complementary strand | | (mimic) | unfolding^{5c} |
| CCR5 | TGT | 2^{nd} base C→T on | TAT | Tyrosine | Lack of minor disulfide bridge, |
| (C101X) | | complementary strand | | (mimic) | unfolding, destabilization^{5c} |
| CCR5 | GGG | 1^{st} base C→T on | AGG | Arginine | Transmembrane helix |
| (G106R) | | complementary strand | | (match) | disruption, destabilization^{5a, 5c} |
| CCR5 | TGC | 2^{nd} base C→T on | TAC | Tyrosine | Lack of minor disulfide bridge, |
| (C178R) | | complementary strand | | (mimic) | destabilization^{5c} |
| CCR5 | CGG | 2^{nd} base C→T on | CAG | Glutamine | Charge neutralized, |
| (R223Q) | | complementary strand | | (match) | destabilization^{5c} |
| CCR5 | TGC | 2^{nd} base C→T on | TAC | Tyrosine | Lack of major disulfide bridge, |
| (C269F) | | complementary strand | | (mimic) | unfolding, destabilization^{5a, 5c} |
| CCR2 | GCA | 2^{nd} base C→T on coding | GTA | Valine | Hydrophobic patch, unfolding, |
| (A335V) | | strand | | (match) | destabilization^{5c} |
| CCR2 | GTC | 2^{nd} base C→T on | TAA | Isoleucine | Affects CCR5 stability⁶ |
| (V64I) | | complementary strand | | (match) | |

TABLE 2
Examples of genome-editing reactions to alter intron-exon junctions and
the START site and produce non-functional CCR5 protein, mimicking the HIV protective effect
of the CCR5-Δ32 allele.

| Target | Consensus | | Genome-editing | Edited | |
|---|---|---|---|---|---|
| site | sequence | Method | reaction(s) | sequence | Outcome |
| Intron | G-G-G-T-R-A- | Base- | 2^{nd} or 3^{rd} base C→T | G-A-G-T-R- | Intron sequence is |
| donor | G-T | editing | on complementary | A-G-T | translated as exon, next |
| | | | strand | (example) | TAG, TGA, or TAA |
| | | | | | sequence is used as |
| | | | | | STOP codon |
| Lariat | T-T-G-T-A | Base- | 3^{th} base C→T on | T-T-A-T-A | The following exon is |
| branch | | editing | coding strand | | skipped from the mature |
| point | | | | | mRNA, which may affect |
| | | | | | the coding frame |
| Intron | Y(rich)-A-C-A- | Base- | 2^{nd} to last base C→T | Y(rich)-A-C- | The exon is skipped from |
| acceptor | G-G | editing | on complementary | A-A-G | the mature mRNA, which |
| | | | strand | | may affect the coding |
| | | | | | frame |
| Start | ATG | Base- | 3^{rd} base C→T on | ATA | The next ATG is used as |
| codon | (Methionine) | editing | complementary | (Isoleucine) | start, which may affect |
| | | | strand | | the coding frame |
| Intron | G-G-G-T-R-A- | Cas9 | random insertions | indels | Intron sequence is |
| donor | G-T | Nickase | and deletions due to | | translated as exon, next |
| | | Fok-1 | NHEJ | | TAG, TGA, or TAA |
| | | | | | sequence is used as |
| | | | | | STOP codon |
| Lariat | T-T-N-T-A | Cas9 | random insertions | indels | The following exon is |
| branch | | Nickase | and deletions due to | | skipped from the mature |
| point | | Fok-1 | NHEJ | | mRNA, which may affect |
| | | | | | the coding frame |
| Intron | Y(rich)-A-C-A- | Cas9 | random insertions | indels | The exon is skipped from |
| acceptor | G-G | Nickase | and deletions due to | | the mature mRNA, which |
| | | Fok-1 | NHEJ | | may affect the coding |
| | | | | | frame |

TABLE 3
Guide-RNAs designed for introducing
naturally-occurring HIV-protective variants
of genome/base editing of CCR5 using
base-editor BE3 or WT Cas9.

| | | | | SEQ | | | |
|---|---|---|---|---|---|---|---|
| Target | Target | Edited | Guide-RNA | ID | | | GE/BE |
| variant | codon | codon | sequence | NO: | (PAM) | Size (C#) | method |
| CCR5 | GAT | AAT | UAAUCCAUCU | 381 | (TGTG) | 20 (C5) | VRER- |
| (D2N) | | | UGUUCCACCC | | | | SpBE3 |
| | | | CCAUCUUGUUC | 382 | {ATAAAT) | 21 (C−1) | KKH- |
| | | | CACCCUGUGC | | | | SaBE3 |
| CCR5 | TGC | TAC | CAGGGCUCCG | 383 | (ATTGAT) | 20 (C1) | KKH- |
| (C20Y) | | | AUGUAUAAUA | | | | SaBE3 |
| | | | UUGGCAGGGC | 384 | (AATAAT) | 20 (C5) | KKH- |
| | | | UCCGAUGUAU | | | | SaBE3 |
| CCR5 | TGT | TAT | GUUGACACAU | 385 | (AAG) | 20 (C6) | SpBE3 |
| (C101Y) | | | UGUAUUUCCA | | | | |
| | | | GAGUUGACAC | 386 | (CAAAGT) | 20 (C8) | KKH- |
| | | | AUUGUAUUUC | | | | SaBE3 |
| CCR5 | GGG | AGG | AUAAAAUAGA | 387 | (GAG) | 20 (C13) | VQR- |
| (G106R) | | | GCCCUGUCAA | | | | SpBE3 |
| CCR5 | TGC | TAC | UGAGAGCUGC | 388 | (AAG) | 20 (C10) | SpBE3 |
| (C178Y) | | | AGGUGUAAUG | | | | |
| | | | GAGAGCUGCA | 389 | (AGA) | 20 (C9) | VQR- |
| | | | GGUGUAAUGA | | | | SpBE3 |
| CCR5 | CGG | CAG | CGACACCGAA | 390 | (TAG) | 20 (C7) | SpBE3 |
| (R223Q) | | | GCAGAGUUUU | | | | |
| | | | GACACCGAAG | 391 | (AGG) | 20 (C6) | SpBE3 |
| | | | CAGAGUUUUU | | | | |
| | | | ACACCGAAGC | 392 | (GGA) | 20 (C5) | VQR- |
| | | | AGAGUUUUUA | | | | SpBE3 |
| | | | CGACACCGAA | 393 | (TAGGAT) | 20 (C7) | SaBE3 |
| | | | GCAGAGUUUU | | | | |
| | | | CGAAGCAGAGU | 394 | (CCGAGT) | 22 (C-2) | SaBE3 |
| | | | UUUUAGGAUUC | | | | |
| CCR5 | TGC | TAC | UACUGCAAUU | 395 | (AAG) | 20 (C6) | SpBE3 |
| (C269Y) | | | AUUCAGGCCA | | | | |
| | | | ACUGCAAUUA | 396 | (AGA) | 20 (C5) | VQR- |
| | | | UUCAGGCCAA | | | | SpBE3 |
| | | | UACUGCAAUU | 397 | (AAGAAT) | 20 (C6) | SaBE3 |
| | | | AUUCAGGCCA | | | | |
| splicing | CAGG | CAAG | CCACCCUGUG | 398 | (AAG) | 20 (C6/5) | SpBE3 |
| acceptor | | | CAUAAAUAAA | | | | |
| site | | | CCCUGUGCAU | 399 | (TGA) | 20 (C3/2) | VQR- |
| | | | AAAUAAAAAG | | | | SpBE3 |
| | | | CACCCUGUGC | 400 | (AGTG) | 20 (C5/4) | VRER- |
| | | | AUAAAUAAAA | | | | SpBE3 |
| | | | CACCCUGUGC | 401 | (AGTGAT) | 20 (C5/4) | KKH- |
| | | | AUAAAUAAAA | | | | SaBE3 |
| | | | UUCCACCCUG | 402 | (AAAAGT) | 20 (C7/8) | KKH- |
| | | | UGCAUAAAUA | | | | SaBE3VQR- |
| | | | UUUAUGC | | | | |
| | | | ACAGGGU | 403 | (AGAT) | 20 (C9) | SpBE3 |
| | | | GGAACA | | | | |
| | | | UGCACAGGGU | 404 | (GGAT) | 20 (C5) | VQR- |
| | | | GGAACAAGAU | | | | SpBE3 |
| | | | AUUUAUGCAC | 405 | (AAG) | 20 (C10) | SpBE3 |
| | | | AGGGUGGAAC | | | | |
| | | | AUGCACAGGG | 406 | (TGG) | 20 (C6) | SpBE3 |
| | | | UGGAACAAGA | | | | |
| splicing | RTNA | indels | GAGGGCAACU | 407 | (TAG) | 20 | WT |
| branch | | | AAAUACAUUC | | | | SpCas9 |
| point | | | AGGGCAACUA | 408 | (AGG) | 20 | WT |
| | | | AAUACAUUCU | | | | SpCas9 |
| | | | AAACUGUUUU | 409 | (AGG) | 20 | WT |
| | | | AUACAUCAAU | | | | SpCas9 |
| | | | CAAACUGUUU | 410 | (TAG) | 20 | WT |
| | | | UAUACAUCAA | | | | SpCas9 |

Base editors: SpBE3-APOBEC1-SpCas9n-UGI; VQR-SpBE3-APOBEC1-VQR-SpCas9n-UGI; EQR-SpBE3 = APOBEC1-EQR-SpCas9n-UGI; VRER-SpBE3 = APOBEC1-VRER-Sp0as9n-UGI; SaBE3 = APOBEC1-SaCas9n-UGI; KKH-SaBE3 = APOBEC1-KKH-SaCas9n-UGI.

TABLE 4
Guide-RNAs designed for engineering new HIV-protective variants
of genome/base editing of CCR5 using base-editor BE3.

| | | | | SEQ | | | |
|---|---|---|---|---|---|---|---|
| Target | Target | Edited | | ID | | | GE/BE |
| variant(s) | codon | codon | Guide-RNA | NO: | (PAM) | Size (C#) | method |
| P19S/L | ccc | TCC | CCCUGCCAAAAAAUCAAUGUG | 411 | (AAG) | 21 (C1/−1) | SpBE3 |
| | | or | CCUGCCAAAAAAUCAAUGUG | 412 | (AAG) | 20 (C1) | SpBE3 |
| | | CTC | GAGCCCUGCCAAAAAAUCAA | 413 | (TGTG) | 20 (C5/6) | VQR-SpBE3 |
| | | | GCCCUGCCAAAAAAUCAAUG | 414 | (TGAA) | 20 (C2/3) | VQR-SpBE3 |
| | | | UAUACAUCGGAGCCCUGCCA | 415 | (AAAAAT) | 20 (C13) | KKH-SaBE3 |
| | | | CAUCGGAGCCCUGCCAAAAA | 416 | (ATCAAT) | 20 (C9/10) | KKH-SaBE3 |
| P34S/L | CCT | TCT | CCUGCCUCCGCUCUACUCAC | 417 | (TGG) | 20 (C5/6) | SpBE3 |
| | | or | CUGCCUCCGCUCUACUCACU | 418 | (GGTG) | 20 (C4/5) | VQR-SpBE3 |
| | | CTT | CUCCUGCCUCCGCUCUACUC | 419 | (ACTGGT) | 20 (C7/8) | KKH-SaBE3 |
| P35S/L | CCG | TCG | same as above for P34S/L | | | | |
| | | or | | | | | |
| | | CTG | | | | | |
| G44S/D | GGT | AGT | AACCAAAGAUGAACACCAGU | 420 | (GAG) | 20 (C3/4) | SpBE3 |
| | | or | CAAAACCAAAGAUGAACACC | 421 | (AGTG) | 20 (C5/6) | VQR-SpBE3 |
| | | GAT | ACAAAACCAAAGAUGAACAC | 422 | (CAG) | 20 (C7/8) | SpBE3 |
| | | | AAAACCAAAGAUGAACACCA | 423 | (GTGAGT) | 20 (C5/6) | SaBE3 |
| | | | CCACAAAACCAAAGAUGAAC | 424 | (ACCAGT) | 20 (C9/10) | KKH-SaBE3 |
| G47S/D | GGC | AGC | GCAUGUUGCCCACAAAACCA | 425 | (AAG) | 20 (C9/10) | SpBE3 |
| | | or | GUUGCCCACAAAACCAAAGA | 426 | (TGAA) | 20 (C5/6) | VQR-SpBE3 |
| | | GAC | CAUGUUGCCCACAAAACCAA | 427 | (AGAT) | 20 (C8/9) | VQR-SpBE3 |
| | | | AGCAUGUUGCCCACAAAACC | 428 | (AAAGAT) | 20 (10/11) | KKH-SaBE3 |
| G115S/D | GGC | AGC | GAGAAGAAGCCUAUAAAAUA | 429 | (GAG) | 20 (C10) | SpBE3 |
| | | or | CAGAGAAGAAGCCUAUAAAA | 430 | (TAG) | 20 (C12) | SpBE3 |
| | | GAC | | | | | |
| G115R/E | GGA | AGA | CCAGAGAAGAAGCCUAUAAA | 431 | (TAG) | 21(C1/−1) | SpBE3 |
| | | or | AUGAAGA | | | | |
| | | GAA | AGAUUCCAGAGAAG | 432 | (AAG) | 20 (C12) | SpBE3 |
| | | | GAUUCCAGAGAAGAAGCCUA | 433 | (TAAAAT) | 20 (C4/5) | KKH-SaBE3 |
| G145R/E | GGG | AGG | CACCCCAAAGGUGACCGUCC | 434 | (TGG) | 20 (C5/6) | SpBE3 |
| | | or | | | | | |
| | | GAG | | | | | |
| S149N | AGT | AAT | CACACUUGUCACCACCCCAA | 435 | (AGG) | 20 (C5) | SpBE3 |
| | | | UCACACUUGUCACCACCCCA | 436 | (AAG) | 20 (C6) | SpBE3 |
| | | | ACUUGUCACCACCCCAAAGG | 437 | (TGAC) | 20 (C2) | VQR-SpBE3 |
| | | | ACACUUGUCACCACCCCAAA | 438 | (GGTG) | 20 (C4) | VQR-SpBE3 |
| | | | AUCACACUUGUCACCACCCC | 439 | (AAAGGT) | 20 (C7) | KKH-SaBE3 |
| P162S/L | CCA | TCA | CUCCCAGGAAUCAUCUUUAC | 440 | (CAG) | 20 (C4/5) | SpBE3 |
| | | or | UCCCAGGAAUCAUCUUUACC | 441 | (AGAT) | 20 (C3/4) | VQR-SpBE3 |
| | | CTA | UCUCCCAGGAAUCAUCUUUA | 442 | (CCAGAT) | 20 (C5/6) | KKH-SaBE3 |
| G163R/E | GGA | AGA | UCCUGGGAGAGACGCAAACA | 443 | (CAG) | 20 (C3/2) | SpBE3 |
| | | or | GUAAAGAUGAUUCCUGGGAG | 444 | (AGAC) | 20 (C13) | VQR-SpBE3 |
| | | GAA | | | | | |
| P183S/L | CCA | TCA | CCAUACAGUCAGUAUCAAUUC | 445 | (TGG) | 21 (C1/−1) | SpBE3 |
| | | or | CAUACAGUCAGUAUCAAUUC | 446 | (TGG) | 20 (C1) | SpBE3 |
| | | CTA | GCUCUCAUUUUCCAUACAGU | 447 | (CAG) | 20 (C12) | SpBE3 |
| | | | UCAUUUUCCAUACAGUCAGU | 448 | (ATCAAT) | 20 (C8) | KKH-SaBE3 |
| G202R/E | GGG | AGG | UCAUUUUCCAUACAGUCAGU | 449 | (ATCAAT) | 20 (C6/C7) | KKH-SaBE3 |
| | | or | | | | | |
| | | GAG | | | | | |
| P206S/L | CCG | TCG | GGUCCUGCCGCUGCUUGUCA | 450 | (TGG) | 20 (C8/9) | SpBE3 |
| | | or | CUGGUCCUGCCGCUGCUUGU | 451 | (CATGGT) | 20 (10/11) | KKH-SaBE3 |
| | | CTG | | | | | |
| G216R/E | GGA | AGA | UCCCGAGUAGCAGAUGACCA | 452 | (TGAC) | 20 (C2/3) | VQR-SpBE3 |
| | | or | UAGGAUUCCCGAGUAGCAGA | 453 | (TGAC) | 20 (C8/9) | VQR-SpBE3 |
| | | GAA | UUUUAGGAUUCCCGAGUAGC | 454 | (AGAT) | 20 (11/12) | VQR-SpBE3 |
| E283K | GAG | AAG | UCUCUGUCACCUGCAUAGCU | 455 | (TGG) | 20 (C4) | SpBE3 |
| | | | AAGAGUCUCUGUCACCUGCA | 456 | (TAG) | 20 (C9) | SpBE3 |
| | | | AGUCUCUGUCACCUGCAUAG | 457 | (CTTGGT) | 20 (C6) | KKH-SaBE3 |
| G286R/E | GGG | AGG | CCAAGAGUCUCUGUCACCUGCA | 458 | (TAG) | 22 (−1/−2) | SpBE3 |
| | | or | | | | | |
| | | GAG | | | | | |
| C290Y | TGC | TAC | GCAGCAGUGCGUCAUCCCAA | 459 | (GAG) | 20 (C5) | SpBE3 |
| | | | UGCAGCAGUGCGUCAUCCCA | 460 | (AGAG) | 20 (C6) | VQR-SpBE3 |
| | | | AUGCAGCAGUGCGUCAUCCC | 461 | (AAG) | 20 (C1) | SpBE3 |
| | | | AUGCAGCAGUGCGUCAUCCC | 462 | (AAGAGT) | 20 (C1) | SaBE3 |
| C291Y | TGC | TAC | GCAGCAGUGCGUCAUCCCAA | 463 | (GAG) | 20 (C2) | VQR-SpBE3 |
| | | | AUGCAGCAGUGCGUCAUCCC | 464 | (AAG) | 20 (C4) | SpBE3 |
| | | | AUGCAGCAGUGCGUCAUCCC | 465 | (AAGAGT) | 20 (C4) | SaBE3 |
| P293S/L | CCC | TCC | CCCAUCAUCUAUGCCUUUGU | 466 | (CGG) | 20 (C1/2) | SpBE3 |
| | | or | CCAUCAUCUAUGCCUUUGU | 467 | (CGG) | 19 (C2) | SpBE3 |
| | | CTC | | | | | |
| P332S/L | CCC | TCC | GGCUCCCGAGCGAGCAAGCU | 468 | (CAG) | 20 (C4/5) | SpBE3 |
| | | or | CAAGAGGCUCCCGAGCGAGC | 469 | (AAG) | 20 (10/11) | SpBE3 |
| | | CTC | GAGGCUCCCGAGCGAGCAAG | 470 | (CTCAGT) | 20 (C7/8) | KKH-SaBE3 |

Base editors: SpBE3-APOBEC1-SpCas9n-UGI; VQR-SpBE3-APOBEC1-VQR-SpCas9n-UGI; EQR-SpBE3-APOBEC1-EQR-SpCas9n-UGI; VRER-SpBE3-APOBEC1-VRER-SpCas9n-UGI; SaBE3 = APOBEC1-SaCas9n-UGI; KKH-SaBE3 = APOBECl-KKH-SaCas9n-UGI.

TABLE 5
Guide-RNAs designed for engineering new HIV-protective variants
of genome/base editing of CCR5 using BE3.

| Target | Target | Stop | | SEQ ID | | | GE/BE |
|---|---|---|---|---|---|---|---|
| variant | codon | codon | Designed guide-RNAs | NO: | (PAM) | Size (C#) | method |
| Q4X | CAA | TAA | CAAGUGUCAAGUCCAAUCUA | 471 | (UGAC) | 20 (C1) | VQR-SpBE3 |
| | | (Ochre) | AAGAUGGAUUAUCAAGUGUC | 472 | (AAG) | 20 (C13) | SpBE3 |
| Q21X | CAA | TAA | CCUGCCAAAAAAUCAAUGUG | 473 | (AAG) | 20 (C6) | SpBE3 |
| | | (Ochre) | UGCCAAAAAAUCAAUGUGAA | 474 | (GCAAAT) | 20 (C4) | SaBE3 |
| W86X | TGG | TAG | CCCAGAAGGGGACAGUAAGA | 475 | (AGG) | 20 (C3/2) | SpBE3 |
| | | (Amber) | GCCCAGAAGGGGACAGUAAG | 476 | (AAG) | 20 (C4/3) | SpBE3 |
| | | or | GAGCCCAGAAGGGGACAGUA | 477 | (AGAA) | 20 (C5/4) | VQR-SpBE3 |
| | | TGA | UGAGCCCAGAAGGGGACAGU | 478 | (AAG) | 20 (C6/7) | SpBE3 |
| | | (Opal) | AGCAUAGUGAGCCCAGAAGGG | 479 | (GACAGT) | 21 (C13) | KKH-SaBE3 |
| Q93X | CAG | TAG | GCUGCCGCCCAGUGGGACUU | 480 | (TGG) | 20 (C9) | SpBE3 |
| | | (Amber) | CUGCCGCCCAGUGGGACUUU | 481 | (GGAA) | 20 (C9) | VQR-SpBE3 |
| | | | CUGCCGCCCAGUGGGACUUU | 482 | (GGAAAT) | 20 (C9) | KKH-SaBE3 |
| | | | GCCCAGUGGGACUUUGGAAA | 483 | (TACAAT) | 20 (C4) | KKH-SaBE3 |
| W94X | TGG | TAG | AGUCCCACUGGGCGGCAGCA | 484 | (TAG) | 20 (C5/6) | SpBE3 |
| | | (Amber) | UCCAAAGUCCCACUGGGCGG | 485 | (CAG) | 20 (C10) | SpBE3 |
| | | or | CCCACUGGGCGGCAGCAUAG | 486 | (TGAG) | 20 (C2/1) | VQR-SpBE3 |
| | | TGA | GUCCCACUGGGCGGCAGCAU | 487 | (AGTG) | 20 (C4/3) | VQR-SpBE3 |
| | | (Opal) | CAAAGUCCCACUGGGCGGCAG | 488 | (CATAGT) | 21 (C8/9) | KKH-SaBE3 |
| Q102X | CAA | TAA | CAAUGUGUCAACUCUUGACA | 489 | (GGG) | 20 (C9) | SpBE3 |
| | | (Ochre) | ACAAUGUGUCAACUCUUGAC | 490 | (AGG) | 20 (C10) | SpBE3 |
| Q170X | CAA | TAA | UUUACCAGAUCUCAAAAAGA | 491 | (AGG) | 20 (C13) | SpBE3 |
| | | (Ochre) | | | | | |
| Q186X | CAG | TAG | ACAGUCAGUAUCAAUUCUGG | 492 | (AAG) | 20 (C6) | SpBE3 |
| | | (Amber) | CAUACAGUCAGUAUCAAUUC | 493 | (TGG) | 20 (C9) | SpBE3 |
| | | | AUACAGUCAGUAUCAAUUCU | 494 | (GGAA) | 20 (C8) | VQR-SpBE3 |
| | | | CAGUCAGUAUCAAUUCUGGA | 495 | (AGAA) | 20 (C5) | VQR-SpBE3 |
| | | | ACAGUCAGUAUCAAUUCUGG | 496 | (AAGAAT) | 20 (C6) | SaBE3 |
| Q188X | CAA | TAA | AUCAAUUCUGGAAGAAUUUC | 497 | (CAG) | 20 (C3) | SpBE3 |
| | | (Ochre) | ACAGUCAGUAUCAAUUCUGG | 498 | (AAG) | 20 (C12) | SpBE3 |
| | | | CAGUCAGUAUCAAUUCUGGA | 499 | (AGAA) | 20 (C11) | VQR-SpBE3 |
| | | | UCAAUUCUGGAAGAAUUUCC | 500 | (AGAC) | 20 (C2) | VQR-SpBE3 |
| | | | ACAGUCAGUAUCAAUUCUGG | 501 | (AAGAAT) | 20 (C12) | SaBE3 |
| W190X | TGG | TAG | CAGAAUUGAUACUGACUGUA | 502 | (TGG) | 20 (C1) | SpBE3 |
| | | (Amber) | AAUUCUUCCAGAAUUGAUAC | 503 | (TGA) | 20 (C8/9) | SpBE3 |
| | | or | | | | | |
| | | TGA | | | | | |
| | | (Opal) | | | | | |
| Q194X | CAG | TAG | GAAUUUCCAGACAUUAAAGA | 504 | (TAG) | 20 (C8) | SpBE3 |
| | | (Amber) | GGAAGAAUUUCCAGACAUUA | 505 | (AAG) | 20 (C12) | SpBE3 |
| | | | GAAGAAUUUCCAGACAUUAA | 506 | (AGAT) | 20 (C11) | VQR-SpBE3 |
| | | | UGGAAGAAUUUCCAGACAUU | 507 | (AAAGAT) | 20 (C13) | KKH-SaBE3 |
| | | | AAGAAUUUCCAGACAUUAAA | 508 | (GATAGT) | 20 (C10) | KKH-SaBE3 |
| W248X | TGG | TAG | CCAGAAGAGAAAAUAAACAAU | 509 | (CATGAT) | 21 (C1/−1) | KKH-SaBE3 |
| | | (Amber) | GGAGCCCAGAAGAGAAAAUA | 510 | (AACAAT) | 20 (C7/6) | KKH-SaBE3 |
| | | or | | | | | |
| | | TGA | | | | | |
| | | (Opal) | | | | | |
| Q261X | CAG | TAG | AACACCUUCCAGGAAUUCUU | 511 | (TGG) | 20 (C10) | 20 (C10) |
| | | (Amber) | CUUCCAGGAAUUCUUUGGCC | 512 | (TGAA) | 20 (C5) | 20 (C5) |
| | | | CCUUCCAGGAAUUCUUUGGC | 513 | (CTGAAT) | 20 (C6) | 20 (C6) |
| | | | UCCAGGAAUUCUUUGGCCUG | 514 | (AATAAT) | 20 (C3) | 20 (C3) |
| Q277X | CAA | TAA | GGACCAAGCUAUGCAGGUGA | 515 | (CAG) | 20 (C5) | SpBE3 |
| | | (Ochre) | ACCAAGCUAUGCAGGUGACA | 516 | (GAG) | 20 (C3) | SpBE3 |
| | | | ACAGGUUGGACCAAGCUAUG | 517 | (CAG) | 20 (C12) | SpBE3 |
| | | | CAGGUUGGACCAAGCUAUGC | 518 | (AGG) | 20 (C11) | SpBE3 |
| | | | AGGUUGGACCAAGCUAUGCA | 519 | (GGTG) | 20 (C10) | VQR-SpBE3 |
| | | | GUUGGACCAAGCUAUGCAGG | 520 | (TGAC) | 20 (C8) | VQR-SpBE3 |
| | | | GACCAAGCUAUGCAGGUGAC | 521 | (AGAG) | 20 (C4) | VQR-SpBE3 |
| | | | AACAGGUUGGACCAAGCUAU | 522 | (GCAGGT) | 20 (C13) | KKH-SaBE3 |
| Q280X | CAG | TAG | AUGCAGGUGACAGAGACUCU | 523 | (UGG) | 20 (C4) | SpBE3 |
| | | (Amber) | UGCAGGUGACAGAGACUCUU | 524 | (GGG) | 20 (C3) | SpBE3 |
| | | | GACCAAGCUAUGCAGGUGAC | 525 | (AGAG) | 20 (C13) | VQR-SpBE3 |
| | | | ACCAAGCUAUGCAGGUGACA | 526 | (GAG) | 20 (C12) | SpBE3 |
| | | | CCAAGCUAUGCAGGUGACAG | 527 | (AGAC) | 20 (C11) | VQR-SpBE3 |
| | | | GCAGGUGACAGAGACUCUUG | 528 | (GGAU) | 20 (C2) | VQR-SpBE3 |
| | | | AUGCAGGUGACAGAGACUCU | 529 | (UGGGAU) | 20 (C4) | SaBE3 |
| Q328X | CAG | TAG | UUUUCCAGCAAGAGGCUCCC | 530 | (GAG) | 20 (C6) | VQR-SpBE3 |
| | | (Amber) | AUUUUCCAGCAAGAGGCUCC | 531 | (CGAG) | 20 (C7) | EQR-SpBE3 |
| | | | UUUCCAGCAAGAGGCUCCCG | 532 | (AGCG) | 20 (C5) | VRER-SpBE3 |
| | | | UCCAGCAAGAGGCUCCCGAG | 533 | (CGAG) | 20 (C3) | EQR-SpBE3 |
| | | | CCAGCAAGAGGCUCCCGAGC | 534 | (GAG) | 20 (C2) | EQR-SpBE3 |
| Q329X | CAA | TAA | same as above for Q328X | | | | |
| | | (Ochre) | | | | | |
| R334X | CGA | TGA | GGCUCCCGAGCGAGCAAGCU | 535 | (CAG) | 20 (C13) | SpBE3 |
| | | (Opal) | GAGGCUCCCGAGCGAGCAAG | 536 | (CUCAGU) | 20 (C13) | KKH-SaBE3 |
| | | | GCGAGCAAGCUCAGUUUACA | 537 | (CCCGAU) | 20 (C2) | KKH-SaBE3 |
| R341X | CGA | TGA | GUUUACACCCGAUCCACUGG | 538 | (GGAG) | 20 (C10) | VQR-SpBE3 |
| | | (Opal) | ACACCCGAUCCACUGGGGAG | 539 | (CAG) | 20 (C6) | SpBE3 |
| | | | CACCCGAUCCACUGGGGAGC | 540 | (AGG) | 20 (C5) | SpBE3 |
| | | | ACCCGAUCCACUGGGGAGCA | 541 | (GGAA) | 20 (C4) | VQR-SpBE3 |
| | | | ACCCGAUCCACUGGGGAGCA | 542 | (GGAAAU) | 20 (C4) | KKH-SaBE3 |
| Q346X | CAA | TAA | GGGGAGCAGGAAAUAUCUGU | 543 | (GGG) | 20 (C7) | SpBE3 |
| | | (Ochre) | UGGGGAGCAGGAAAUAUCUG | 544 | (UGG) | 20 (C8) | SpBE3 |
| | | | ACUGGGGAGCAGGAAAUAUC | 545 | (UGUG) | 20 (C10) | VQR-SpBE3 |
| | | | GCAGGAAAUAUCUGUGGGCU | 546 | (UGUG) | 20 (C2) | VQR-SpBE3 |

Base editors: SpBE3-APOBEC1-SpCas9n-UGI; VQR-SpBE3-APOBEC1-VQR-SpCas9n-UGI; EQR-SpBE3 = APOBEC1-EQR-SpCas9n-UGI; VRER-SpBE3 = APOBEC1-VRER-SpCas9n-UGI; SaBE3 = APOBEC1-SaCas9n-UGI; KKH-SaBE3 = APOBEC1-KKH-SaCas9n-UGI.

TABLE 6
Examples of genome-editing reactions to
introduce STOP codons todestabilize or prevent
the translation of full-length functional CCR5
protein (FIG.3), mimicking the HIV
protective effect of the CCR5-Δ32 allele.

| | Amino acid | | Genome- | Edited | Stop |
|---|---|---|---|---|---|
| Target | (abbre- | | editing | out- | codon |
| codon | viation) | Method | reaction(s) | come | name |
| CAG | Glutamine | Base- | 1^{st} base | TAG | Amber |
| | (Gln/Q) | editing | C→T coding | | |
| | | | strand | | |
| TGG | Tryptophan | Base- | 2^{nd} base | TAG | Amber |
| | (Trp/W) | editing | C→T on | | |
| | | | comple- | | |
| | | | mentary | | |
| | | | strand | | |
| CGA | Arginine | Base- | 1^{st} base | TGA | Opal |
| | (Arg/R) | editing | C→T | | |
| | | | coding | | |
| | | | strand | | |
| CAA | Glutamine | Base- | 1^{st} base | TAA | Ochre |
| | (Gln/Q) | editing | C→T | | |
| | | | coding | | |
| | | | strand | | |
| TGG | Tryptophan | Base- | 3^{rd} base | UGA | Opal |
| | (Trp/W) | editing | C→T on | | |
| | | | comple- | | |
| | | | mentary | | |
| | | | strand | | |
| CGG | Arginine | Base- | 1^{st} base | TAG | Amber |
| | (Arg/R) | editing | C→T on | | |
| | | | coding | | |
| | | | strand | | |
| | | | and 2^{nd} | | |
| | | | base C→T | | |
| | | | on comple- | | |
| | | | mentary | | |
| | | | strand | | |
| CGA | Arginine | Base- | 1^{st} base | TAA | Ochre |
| | (Arg/R) | editing | C→T on | | |
| | | | coding | | |
| | | | strand | | |
| | | | and 2^{nd} | | |
| | | | base C→T | | |
| | | | on comple- | | |
| | | | mentary | | |
| | | | strand | | |

TABLE 7
Examples of base-editing reactions to alter amino acid
codons in order to produce novel CCR5 variants (FIG. 3).

| Target | Amino acid | Base-editing | Edited | Edited amino acid |
|---|---|---|---|---|
| codon | (abbreviations) | reaction(s) | codon | (abbreviations) |
| CTT | Leucine (Leu/L) | 1^{st} base C→T on | TTT | Phenylalanine (Phe, F) |
| | | coding strand | | |
| CTC | Leucine (Leu/L) | 1^{st} base C→T on | TTC | Phenylalanine (Phe, F) |
| | | coding strand | | |
| ATG | Methionine (Met/M) | 3^{rd} base C→T on | ATA | Isoleucine (Ile, I) |
| | | complementary strand | | |
| GTT | Valine (Val/V) | 1^{st} base C→T on | ATT | Isoleucine (Ile, I) |
| | | complementary strand | | |
| GTC | Valine (Val/V) | 1^{st} base C→T on | ATC | Isoleucine (Ile, I) |
| | | complementary strand | | |
| GTA | Valine (Val/V) | 1^{st} base C→T on | ATA | Isoleucine (Ile, I) |
| | | complementary strand | | |
| GTG | Valine (Val/V) | 1^{st} base C→T on | ATG | Methionine (Met/M) |
| | | complementary strand | | |
| TCT | Serine (Ser/S) | 2^{nd} base C→T on | TTT | Phenylalanine (Phe, F) |
| | | coding strand | | |
| TCC | Serine (Ser/S) | 2^{nd} base C→T on | TTC | Phenylalanine (Phe, F) |
| | | coding strand | | |
| TCA | Serine (Ser/S) | 2^{nd} base C→T on | TTA | Leucine (Leu/L) |
| | | coding strand | | |
| TCG | Serine (Ser/S) | 2^{nd} base C→T on | TTG | Leucine (Leu/L) |
| | | coding strand | | |
| AGT | Serine (Ser/S) | 2^{nd} base C→T on | AAT | Asparagine (Asp/N) |
| | | complementary strand | | |
| AGC | Serine (Ser/S) | 2^{nd} base C→T on | AAC | Asparagine (Asp/N) |
| | | complementary strand | | |
| CCT | Proline (Pro/P) | 1^{st} base C→T on | TCT | Serine (Ser/S) |
| | | coding strand | | |
| CCC | Proline (Pro/P) | 1^{st} base C→T on | TCC | Serine (Ser/S) |
| | | coding strand | | |
| CCA | Proline (Pro/P) | 1^{st} base C→T on | TCA | Serine (Ser/S) |
| | | coding strand | | |
| CCG | Proline (Pro/P) | 1^{st} base C→T on | TCG | Serine (Ser/S) |
| | | coding strand | | |
| CCT | Proline (Pro/P) | 2^{nd} base C→T on | CTT | Leucine (Leu/L) |
| | | coding strand | | |
| CCC | Proline (Pro/P) | 2^{nd} base C→T on | CTC | Leucine (Leu/L) |
| | | coding strand | | |
| CCA | Proline (Pro/P) | 2^{nd} base C→T on | CTA | Leucine (Leu/L) |
| | | coding strand | | |
| CCG | Proline (Pro/P) | 2^{nd} base C→T on | CTG | Leucine (Leu/L) |
| | | coding strand | | |
| ACT | Threonine (Thr/T) | 2^{nd} base C→T on | ATT | Isoleucine (11e/1) |
| | | coding strand | | |
| ACC | Threonine (Thr/T) | 2^{nd} base C→T on | ATC | Isoleucine (11e/1) |
| | | coding strand | | |
| ACA | Threonine (Thr/T) | 2^{nd} base C→T on | ATA | Isoleucine (11e/1) |
| | | coding strand | | |
| ACG | Threonine (Thr/T) | 2^{nd} base C→T on | ATG | Methionine (Met/M) |
| | | coding strand | | |
| GCT | Alanine (Ala/A) | 2^{nd} base C→T on | GTT | Valine (Val/V) |
| | | coding strand | | |
| GCC | Alanine (Ala/A) | 2^{nd} base C→T on | GTC | Valine (Val/V) |
| | | coding strand | | |
| GCA | Alanine (Ala/A) | 2^{nd} base C→T on | GTA | Valine (Val/V) |
| | | coding strand | | |
| GCG | Alanine (Ala/A) | 2^{nd} base C→T on | GTG | Valine (Val/V) |
| | | coding strand | | |
| GCT | Alanine (Ala/A) | 1^{st} base C→T on | ACT | Threonine (Thr/T) |
| | | complementary strand | | |
| GCC | Alanine (Ala/A) | 1^{st} base C→T on | ACC | Threonine (Thr/T) |
| | | complementary strand | | |
| GCA | Alanine (Ala/A) | 1^{st} base C→T on | ACA | Threonine (Thr/T) |
| | | complementary strand | | |
| GCG | Alanine (Ala/A) | 1^{st} base C→T on | ACG | Threonine (Thr/T) |
| | | complementary strand | | |
| CAT | Histidine (His/H) | 1^{st} base C→T on | TAT | Tyrosine (Tyr/Y) |
| | | complementary strand | | |
| CAC | Histidine (His/H) | 1^{st} base C→T on | TAC | Tyrosine (Tyr/Y) |
| | | complementary strand | | |
| GAT | Aspartate (Asp/D) | 1^{st} base C→T on | AAT | Asparagine (Asp/N) |
| | | complementary strand | | |
| GAC | Aspartate (Asp/D) | 1^{st} base C→T on | AAC | Asparagine (Asp/N) |
| | | complementary strand | | |
| GAA | Glutamate (Glu/E) | 1^{st} base C→T on | AAA | Lysine (Lys/K) |
| | | complementary strand | | |
| GAG | Glutamate (Glu/E) | 1^{st} base C→T on | AAG | Lysine (Lys/K) |
| | | complementary strand | | |
| TGT | Cysteine (Cys/C) | 2^{nd} base C→T on | TAT | Tyrosine (Tyr/Y) |
| | | complementary strand | | |
| TGC | Cysteine (Cys/C) | 2^{nd} base C→T on | TAC | Tyrosine (Tyr/Y) |
| | | complementary strand | | |
| CGT | Arginine (Arg/R) | 1^{st} base C→T on | TGT | Cysteine (Cys/C) |
| | | coding strand | | |
| CGC | Arginine (Arg/R) | 1^{st} base C→T on | TGC | Cysteine (Cys/C) |
| | | coding strand | | |
| CGC | Arginine (Arg/R) | 1^{st} base C→T on | TGC | Cysteine (Cys/C) |
| | | coding strand | | |
| AGA | Arginine (Arg/R) | 2^{nd} base C→T on | AAA | Lysine (Lys/K) |
| | | complementary strand | | |
| AGG | Arginine (Arg/R) | 2^{nd} base C→T on | AAG | Lysine (Lys/K) |
| | | complementary strand | | |
| GGT | Glycine (Gly/G) | 2^{nd} base C→T on | GAT | Aspartate (Asp/D) |
| | | complementary strand | | |
| GGC | Glycine (Gly/G) | 2^{nd} base C→T on | GAC | Aspartate (Asp/D) |
| | | complementary strand | | |
| GGA | Glycine (Gly/G) | 2^{nd} base C→T on | GAA | Glutamate (Glu/E) |
| | | complementary strand | | |
| GGG | Glycine (Gly/G) | 2^{nd} base C→T on | GAG | Glutamate (Glu/E) |
| | | complementary strand | | |
| GGT | Glycine (Gly/G) | 1^{st} base C→T on | AGT | Serine (Ser/S) |
| | | complementary strand | | |
| GGC | Glycine (Gly/G) | 1^{st} base C→T on | AGC | Serine (Ser/S) |
| | | complementary strand | | |
| GGA | Glycine (Gly/G) | 1^{st} base C→T on | AGA | Arginine (Arg/R) |
| | | complementary strand | | |
| GGG | Glycine (Gly/G) | 1^{st} base C→T on | AGG | Arginine (Arg/R) |
| | | complementary strand | | |

TABLE 8
Examples of specific guide RNA sequences used for making variants.
The sequences, from top to bottom, correspond to SEQ ID NOs: 547-636.

| CCR5 | | guide RNA | | C | | | | | | | M.- | Hous | Prox/ | Off- |
|---|---|---|---|---|---|---|---|---|---|---|---|---|---|---|
| variant | Cas9-BE^{a} | sequence | PAM | target | Eff.^{b} | Hsu^{c} | Fusi | Chari | Doench | Wang | M. | den | GC | targets^{d} |
| P332S/L | KKH-SaBE3 | GAGGCUCCCG | (CTCAGT) | C7/C8 | 4.9 | 97 | — | 85 | 38 | 80 | 92 | 4 | − | 0-0-0- |
| | | AGCGAGCAAG | | | | | | | | | | | | 1-8 |
| R334X | KKH-SaBE3 | GAGGCUCCCG | (CTCAGT) | C13 | 4.9 | 97 | — | 85 | 38 | 80 | 92 | 4 | − | 0-0-0- |
| | | AGCGAGCAAG | | | | | | | | | | | | 1-8 |
| W94X | SpBE3 | UCCAAAGUCC | (CAG) | C10/C11 | 7.8 | 82 | 51 | 91 | 69 | 85 | 57 | 7 | +GG | 0-0-0- |
| | | CACUGGGCGG | | | | | | | | | | | | 12-109 |
| C290Y, | SpBE3 | GCAGCAGUGC | (GAG) | C4/C−1 | 7.2 | 46 | 64 | 88 | 87 | 84 | 60 | 7 | − | 0-1-0- |
| C291Y | | GUCAUCCCAA | | | | | | | | | | | | 8-88 |
| P19S/L | VQR-SpBE3 | GAGCCCUGCC | (TGTG) | C5/C6 | 6.2 | 100 | — | 85 | 49 | 83 | 41 | 6 | − | 0-0-0- |
| | | AAAAAAUCAA | | | | | | | | | | | | 0-2 |
| W94X | KKH-SaBE3 | CAAAGUCCCAC | (CATAGT) | C8/C9 | 5.0 | 98 | — | 65 | 19 | 76 | 76 | 7 | + | 0-0-0- |
| | | UGGGCGGCAG | | | | | | | | | | | | 1-19 |
| Q328X, | VRER-SpBE3 | UUUCCAGCAA | (AGCG) | C5/C8 | 5.5 | 95 | — | 96 | 38 | 73 | 53 | 5 | + | 0-0-0- |
| Q329X | | GAGGCUCCCG | | | | | | | | | | | | 2-6 |
| Q188X | SaBE3 | ACAGUCAGUAU | (AAGAAT) | C12 | 4.5 | 92 | — | 84 | 39 | 87 | 36 | 4 | −GG | 0-0-0- |
| | | CAAUUCUGG | | | | | | | | | | | | 2-31 |
| G115R/E | KKH-SaBE3 | GAUUCCAGAG | (TAAAAT) | C4/C5 | 5.4 | 87 | — | 95 | 44 | 78 | 45 | 5 | − | 0-0-0- |
| | | AAGAAGCCUA | | | | | | | | | | | | 4-46 |
| P19S/L | KKH-SaBE3 | UAUACAUCGG | (AAAAAT) | C13 | 4.8 | 97 | — | 36 | 30 | 78 | 48 | 4 | + | 0-0-0- |
| | | AGCCCUGCCA | | | | | | | | | | | | 1-9 |
| A335V | VQR-SpBE3 | GAGCAAGCUC | (CGAT) | C4 | 7.8 | 82 | — | 10 | 53 | 70 | 39 | 7 | − | 0-0-0- |
| | | AGUUUACACC | | | | | | | | | | | | 8-88 |
| R341X | VQR-SpBE3 | GUUUACACCC | (GGAG) | C10 | 6.8 | 91 | — | 87 | 30 | 83 | 37 | 6 | +GG | 0-0-0- |
| | | GAUCCACUGG | | | | | | | | | | | | 2-31 |
| Q277X | VQR-SpBE3 | AGGUUGGACC | (GGTG) | C10 | 7.6 | 99 | — | 67 | 27 | 71 | 35 | 7 | − | 0-0-0- |
| | | AAGCUAUGCA | | | | | | | | | | | | 1-5 |
| E283K | KKH-SaBE3 | AGUCUCUGUC | (CTTGGT) | C6 | 9.0 | 91 | — | 81 | 39 | 62 | 40 | 9 | − | 0-0-0- |
| | | ACCUGCAUAG | | | | | | | | | | | | 6-42 |
| G44D/S | SaBE3 | AAAACCAAAG | (GTGAGT) | C5/C6 | 4.6 | 44 | — | 94 | 54 | 86 | 45 | 4 | − | 1-0-0- |
| | | AUGAACACCA | | | | | | | | | | | | 13-190 |
| G163R/E | VQR-SpBE3 | GUAAAGAUGA | (AGAC) | C13 | 4.9 | 41 | — | 70 | 51 | 84 | 50 | 4 | + | 0-1-2- |
| | | UUCCUGGGAG | | | | | | | | | | | | 37-211 |
| Q186X | SpBE3 | ACAGUCAGUA | (AAG) | C6 | 4.5 | 62 | 66 | 84 | 37 | 87 | 36 | 4 | −GG | 0-0-2- |
| | | UCAAUUCUGG | | | | | | | | | | | | 25-95 |
| W248X | KKH-SaBE3 | GGAGCCCAGA | (AACAAT) | C7/6 | 5.2 | 82 | — | 86 | 12 | 77 | 48 | 5 | − | 0-0-1- |
| | | AGAGAAAAUA | | | | | | | | | | | | 3-95 |
| G47S/D | VQR-SpBE3 | CAUGUUGCCC | (AGAT) | C8/C9 | 7.1 | 39 | — | 65 | 41 | 81 | 58 | 7 | − | 1-0-0- |
| | | ACAAAACCAA | | | | | | | | | | | | 17-207 |
| Q277X | SpBE3 | ACAGGUUGGA | (CAG) | C12 | 5.5 | 81 | 68 | 95 | 21 | 47 | 69 | 5 | − | 0-0-0- |
| | | CCAAGCUAUG | | | | | | | | | | | | 11-78 |
| Q277X | KKM-SaBE3 | AACAGGUUGG | (GCAGGT) | C13 | 5.6 | 95 | — | 18 | 17 | 46 | 54 | 5 | − | 0-0-0- |
| | | ACCAAGCUAU | | | | | | | | | | | | 3-15 |
| P183S/L | KKH-SaBE3 | UCAUUUUCCA | (ATCAAT) | C8 | 3.7 | 89 | — | 42 | 43 | 52 | 28 | 3 | − | 0-0-0- |
| | | UACAGUCACU | | | | | | | | | | | | 9-53 |
| G202R/E | KKH-SaBE3 | UCAUUUUCCA | (ATCAAT) | C6/C7 | 3.7 | 89 | — | 42 | 43 | 52 | 28 | 3 | − | 0-0-0- |
| | | UACAGUCAGU | | | | | | | | | | | | 9-53 |
| R334X | KKH-SaBE3 | GCGAGCAAGC | (CCCGAT) | C2 | 7.2 | 95 | — | 60 | 29 | 41 | 46 | 7 | − | 0-0-0- |
| | | UCAGUUUACA | | | | | | | | | | | | 1-14 |
| S149N | KKH-SaBE3 | AUCACACUUG | (AAAGGT) | C7 | 4.7 | 90 | — | 53 | 1 | 60 | 58 | 4 | + | 0-0-0- |
| | | UCACCACCCC | | | | | | | | | | | | 4-36 |
| C20Y | KKH-SaBE3 | UUGGCAGGGC | (AATAAT) | C5 | 7.5 | 99 | — | 8 | 2 | 36 | 71 | 7 | − | 0-0-0- |
| | | UCCGAUGUAU | | | | | | | | | | | | 1-6 |
| Q4X | VQR-SpBE3 | CAAGUGUCAA | (TGAC) | C1 | 3.5 | 81 | — | 23 | 5 | 72 | 48 | 3 | − | 0-0-1- |
| | | GUCCAAUCUA | | | | | | | | | | | | 9-139 |
| C17RY | SpBE3 | UGAGAGCUGC | (AAG) | C10/C11 | 10.1 | 70 | 58 | 85 | 31 | 66 | 38 | 10 | − | 0-0-0- |
| | | AGGUGUAAUG | | | | | | | | | | | | 26-226 |
| P332S/L | SpBE3 | CAAGAGGCUC | (AAG) | C10/C11 | 6.8 | 87 | 47 | 60 | 3 | 77 | 35 | 6 | + | 0-0-0- |
| | | CCGAGCGAGC | | | | | | | | | | | | 4-100 |
| Q93X | KKH-SaBE3 | GCCCAGUGGG | (TACAAT) | C4 | 6.0 | 92 | — | 28 | 11 | 59 | 39 | 6 | − | 0-0-0- |
| | | ACUUUGGAAA | | | | | | | | | | | | 6-38 |
| C20Y | KKH-SaBE3 | CACCCCUCCC | (ATTCAT) | Cl | 6.9 | 96 | — | 9 | 8 | 41 | 55 | 6 | − | 0-0-0- |
| | | AUCUAUAAUA | | | | | | | | | | | | 1-15 |
| D2N | VRER-SpBE3 | UAAUCCAUCU | (TGTG) | C5 | 5.6 | 99 | — | 35 | 12 | 57 | 30 | 5 | + | 0-0-0- |
| | | UGUUCCACCC | | | | | | | | | | | | 0-3 |
| P332S/L | SpBE3 | GGCUCCCGAG | (CAG) | C5/C6 | 4.2 | 88 | 43 | 68 | 9 | 47 | 50 | 4 | − | 0-0-0- |
| | | CGAGCAAGCU | | | | | | | | | | | | 4-61 |
| R334X | SpBE3 | GGCUCCCGAG | (CAG) | C13 | 4.2 | 88 | 43 | 68 | 9 | 47 | 50 | 4 | − | 0-0-0- |
| | | CGAGCAAGCU | | | | | | | | | | | | 4-61 |
| G216S/D | VQR-SpBE3 | UAGGAUUCCC | (TGAC) | C8/C9 | 7.7 | 45 | — | 48 | 27 | 76 | 46 | 7 | − | 0-1-0- |
| | | GAGUAGCAGA | | | | | | | | | | | | 5-99 |
| W86X | VQR-SpBE3 | GAGCCCAGAA | (AGAA) | C5/C6 | 5.2 | 54 | — | 93 | 8 | 63 | 68 | 4 | − | 0-0-2- |
| | | GGGGACAGUA | | | | | | | | | | | | 29-348 |
| C290Y, | SaBE3 | AUGCAGCAGU | (AAGAGT) | C4/C7 | 8.2 | 65 | — | 65 | 8 | 57 | 62 | 8 | + | 0-1-0- |
| C291Y | | GCGUCAUCCC | | | | | | | | | | | | 2-26 |
| S149N | VQR-SpBE3 | ACUUGUCACC | (TGAC) | C2 | 7.4 | 40 | — | 95 | 23 | 78 | 51 | 7 | −GG | 1-0-0- |
| | | ACCCCAAAGG | | | | | | | | | | | | 10-148 |
| C269Y | VQR-SpBE3 | ACUGCAAUUA | (AGA) | C5 | 5.3 | 58 | — | 70 | 7 | 61 | 65 | 5 | + | 0-0-2- |
| | | UUCAGGCCAA | | | | | | | | | | | | 26-277 |
| D2N | KKG-SaBE3 | CCAUCUUGUU | (ATAAAT) | C-l | 4.2 | 94 | — | 19 | 7 | 57 | 30 | 6 | + | 0-0-0- |
| | | CCACCCUGUGC | | | | | | | | | | | | 3-29 |
| C178Y | VQR-SpBE3 | GAGAGCUGCA | (AGA) | C9 | 3.2 | 70 | — | 53 | 6 | 76 | 36 | 3 | − | 0-0-0- |
| | | GGUGUAAUGA | | | | | | | | | | | | 22-251 |
| S149N | SpBE3 | CACACUUGUC | (AGG) | C5 | 6.2 | 39 | 64 | 87 | 21 | 65 | 63 | 6 | + | 1-0-0- |
| | | ACCACCCCAA | | | | | | | | | | | | 22-147 |
| P19S/L | KKH-SaBE3 | CAUCGGAGCC | (ATCAAT) | C9/10 | 7.4 | 93 | — | 66 | 15 | 38 | 40 | 7 | − | 0-0-0- |
| | | CUCCCAAAAA | | | | | | | | | | | | 0-19 |
| Q261X | KKH-SaBE3 | UCCAGGAAUU | (AATAAT) | C3 | 6.5 | 88 | — | 79 | 8 | 41 | 49 | 6 | + | 0-0-0- |
| | | CUUUGGCCUG | | | | | | | | | | | | 3-59 |
| C290Y, | SpBE3 | AUGCAGCAGU | (AAG) | C4/C7 | 8.2 | 59 | 50 | 65 | 7 | 57 | 62 | 8 | + | 0-1-1- |
| C291Y | | GCGUCAUCCC | | | | | | | | | | | | 5-83 |
| Q93X | KKH-SaBE3 | CUGCCGCCCA | (GGAAAT) | C9 | 6.2 | 96 | 40 | 16 | 3 | 18 | 67 | 6 | − | 0-0-0- |
| | | GUGGGACUUU | | | | | | | | | | | | 0-16 |
| C269Y | SaBEJ | UACUGCAAUU | (AAGAAT) | C6 | 4.4 | 93 | — | 15 | 11 | 57 | 22 | 4 | + | 0-0-0- |
| | | AUUCAGGCCA | | | | | | | | | | | | 4-38 |
| P206S/L | KKH-SaBE3 | CUGGUCCUGC | (CATGGT) | C10/C11 | 9.7 | 88 | — | 22 | 6 | 29 | 60 | 9 | − | 0-0-1- |
| | | CGCUGCUUGU | | | | | | | | | | | | 3-48 |
| G47S/I) | VQR-SpBE3 | GUUGCCCACA | (TGAA) | C5/C6 | 5.1 | 37 | — | 94 | 24 | 88 | 32 | 5 | − | 1-1-1- |
| | | AAACCAAAGA | | | | | | | | | | | | 15-198 |
| G47S/D | KKH-SaBE3 | AGCAUGUUGC | (AAAGAT) | C10/C11 | 6.2 | 90 | — | 27 | 13 | 56 | 21 | 6 | − | 0-0-0- |
| | | CCACAAAACC | | | | | | | | | | | | 6-36 |
| Q93X | SpBE3 | GCUGCCGCCC | (TGG) | C10 | 7.4 | 70 | 42 | 32 | 3 | 56 | 51 | 7 | − | 0-0-2- |
| | | AGUGGGACUU | | | | | | | | | | | | 13-126 |
| R341X | KKH-SaBE3 | ACCCGAUCCA | (GGAAAT) | C4 | 4.4 | 94 | 55 | 28 | 7 | 26 | 51 | 4 | + | 0-0-0- |
| | | CUGGGGAGCA | | | | | | | | | | | | 1-18 |
| P34S/L, | SpBE3 | CCUGCCUCCG | (TGG) | C5-C9 | 6.3 | 55 | 47 | 25 | 17 | 47 | 56 | 6 | − | 0-1-0- |
| P35S/L | | CUCUACUCAC | | | | | | | | | | | | 26-175 |
| G216S/ | VQR-SpBE3 | UCCCGAGUAG | (TGAC) | C2/C3 | 3.9 | 46 | — | 68 | 31 | 53 | 44 | 3 | − | 1-0-0- |
| I) | | CAGAUGACCA | | | | | | | | | | | | 4-60 |
| Splice | VQR-SpBE3 | UGCACAGGCU | (GGAT) | C5 | 5.5 | 65 | — | 47 | 8 | 29 | 71 | 5 | − | 0-0-1- |
| site | | GGAACAACAU | | | | | | | | | | | | 15-253 |
| Splice | SpBE3 | AUGCACAGGG | (TGG) | C6 | 4.9 | 42 | 55 | 71 | 11 | 65 | 55 | 4 | − | 0-0-1- |
| site | | UGGAACAAGA | | | | | | | | | | | | 43-421 |
| Splice | KKH-SaBE3 | UUCCACCCUG | (AAAAGT) | C7/8 | 3.1 | 93 | — | 31 | 11 | 24 | 43 | 3 | − | 0-0-0- |
| site | | UGCAUAAAUA | | | | | | | | | | | | 43-421 |
| Splice | VQR-SpBE3 | CCCUGUGCAU | (TGA) | C3/2 | 6.3 | 36 | — | 72 | 44 | 67 | 21 | 6 | − | 0-1-3- |
| site | | AAAUAAAAAG | | | | | | | | | | | | 40-394 |
| Q277X | SpBE3 | CAGGUUGGAC | (AGG) | C11 | 6.1 | 79 | 47 | 44 | 4 | 50 | 33 | 6 | − | 0-0-2- |
| | | CAAGCUAUGC | | | | | | | | | | | | 9-77 |
| Q93X | VQR-SpBE3 | CUGCCGCCCA | (GGAA) | C9 | 6.2 | 78 | — | 16 | 3 | 18 | 67 | 6 | − | 0-0-1- |
| | | GUGGGACUUU | | | | | | | | | | | | 4-88 |
| R223Q | SaBE3 | CGAAGCAGAGU | (CCGAGT) | C-2 | 6.5 | 86 | — | 4 | 2 | 19 | 57 | 4 | − | 0-0-1- |
| | | UUUUAGGAUUC | | | | | | | | | | | | 9-74 |
| G44D/S | KKH-SaBE3 | CCACAAAACC | (ACCAGT) | C9/C10 | 6.1 | 85 | — | 39 | 9 | 54 | 16 | 6 | − | 0-0-1- |
| | | AAAGAUGAAC | | | | | | | | | | | | 6-77 |
| P206S/L | SpBE3 | GGUCCUGCCG | (TGG) | C8/C9 | 4.9 | 65 | 46 | 14 | 4 | 62 | 33 | 4 | − | 0-0-3- |
| | | CUGCUUGUCA | | | | | | | | | | | | 18-149 |
| P34S/L, | KKH-SaBE3 | CUCCUGCCUC | (ACTGGT) | C3-C8 | 7.2 | 93 | — | 12 | 3 | 29 | 37 | 7 | − | 0-0-0- |
| P35S/L | | CGCUCUACUC | | | | | | | | | | | | 6-47 |
| W94X | VQR-SpBE3 | CCCACUGCCC | (TGAG) | C2/1 | 7.3 | 85 | — | 94 | 1 | 42 | 31 | 7 | − | 0-0-0- |
| | | GGCAGCAUAG | | | | | | | | | | | | 7-98 |
| Splice | SpBE3 | AUUUAUGCAC | (AAG) | C10 | 7.7 | 61 | 39 | 11 | 13 | 41 | 44 | 7 | − | 0-0-3- |
| site | | AGGGUGGAAC | | | | | | | | | | | | 11-172 |
| Splice | VQR-SpBE3 | UUUAUGCACA | (AGAT) | C9 | 6.9 | 58 | — | 82 | 9 | 45 | 46 | 6 | − | 0-0-2- |
| site | | GGGUGGAACA | | | | | | | | | | | | 18-283 |
| C290Y, | VQR-SpBE3 | UGCAGCAGUGC | (AGAG) | C6/C3 | 7.2 | 59 | — | 51 | 7 | 40 | 51 | 3 | − | 0-1-0- |
| C291Y | | GUCAUCCCA | | | | | | | | | | | | 7-73 |
| W190X | SpBE3 | CAGAAUUGAU | (TGG) | C1 | 3.7 | 73 | 42 | 41 | 3 | 32 | 48 | 3 | − | 0-0-1- |
| | | ACUGACUGUA | | | | | | | | | | | | 14-140 |
| Q102X | SpBE3 | ACAAUGUGUC | (AGG) | C10 | 8.3 | 77 | 50 | 55 | 9 | 48 | 21 | 8 | − | 0-0-1- |
| | | AACUCUUGAC | | | | | | | | | | | | 7-96 |
| Q21X | SaBE3 | UGCCAAAAAA | (GCAAAT) | C4 | 3.7 | 75 | — | 48 | 22 | 24 | 30 | 3 | − | 0-0-0- |
| | | UCAAUGUGAA | | | | | | | | | | | | 18-172 |
| Splice | WT SpCas9 | GAGGGCAACU | (TAG) | n/a | 6.5 | 69 | 40 | 51 | 2 | 69 | 10 | 6 | − | 0-0-0- |
| site | | AAAUACAUUC | | | | | | | | | | | | 15-134 |
| Q280X | SaBE3 | AUCCACCUCA | (TCCCAT) | C4 | 6.4 | 47 | 49 | 48 | 3 | 54 | 43 | 6 | − | 0-1-0- |
| | | CAGAGACUCU | | | | | | | | | | | | 6-55 |
| R34IX | SpBE3 | CACCCGAUCC | (AGG) | C5 | 6.9 | 68 | 45 | 32 | 1 | 42 | 34 | 6 | + | 0-0-1- |
| | | ACUGGGGAGC | | | | | | | | | | | | 17-100 |
| R223Q | VQR-SpBE3 | ACACCGAAGC | (GGA) | C5 | 7.1 | 63 | — | 47 | 21 | 30 | 30 | 7 | − | 0-0-3- |
| | | AGAGUUUUUA | | | | | | | | | | | | 10-160 |
| P162S/L | KKH-SaBE3 | UCUCCCAGCA | (CCAGAT) | C5/C6 | 6 | 91 | — | 56 | 1 | 23 | 24 | 6 | − | 0-0-0- |
| | | AUCAUCUUUA | | | | | | | | | | | | 1-50 |
| Q261X | VQR-SpBE3 | CUUCCAGGAA | (TGAA) | C5 | 6.3 | 56 | — | 10 | 7 | 49 | 27 | 6 | + | 0-1-2- |
| | | UUCUUUGGCC | | | | | | | | | | | | 20-207 |
| Splice | WT SpCas9 | AGGGCAACUA | (AGG) | n/a | 5.3 | 40 | 40 | 14 | 2 | 56 | 40 | 5 | − | 0-0-6- |
| site | | AAUACAUUCU | | | | | | | | | | | | 39-217 |
| W190X | SpBE3 | AAUUCUUCCA | (TGA) | C8/9 | 5.6 | 61 | — | 14 | 12 | 49 | 11 | 5 | − | 0-0-0- |
| | | GAAUUGAUAC | | | | | | | | | | | | 34-335 |
| P162S/L | VQR-SpBE3 | UCCCAGGAAU | (AGAT) | C3/C4 | 3.3 | 74 | — | 35 | 10 | 21 | 25 | 3 | − | 0-0-2- |
| | | CAUCUUUACC | | | | | | | | | | | | 16-168 |
| Q328X, | EQR-SpBE3 | AUUUUCCAGC | (CGAG) | C7/C10 | 9.8 | 54 | — | 56 | 5 | 39 | 32 | 9 | + | 0-0-3- |
| Q329X | | AAGAGGCUCC | | | | | | | | | | | | 18-484 |
| Splice | WT SpCas9 | AAACUGUUUU | (AGG) | n/a | 4.4 | 49 | 36 | 5 | 6 | 48 | 25 | 4 | − | 0-0-7- |
| site | | AUACAUCAAU | | | | | | | | | | | | 33-312 |
| R223Q | SaBE3 | CGACACCGAA | (TAGGAT) | C7 | 4.7 | 77 | — | 21 | 3 | 14 | 33 | 4 | − | 0-1-0- |
| | | GCAGAGUUUU | | | | | | | | | | | | 0-11 |
| Q261X | SaBE3 | CCUUCCAGGA | (CTGAAT) | C6 | 6.1 | 61 | — | 16 | 10 | 38 | 14 | 6 | − | 0-1-2- |
| | | AUUCUUUGGC | | | | | | | | | | | | 2-54 |
| G145R/E | SpBE3 | CACCCCAAAG | (TGG) | C5/C6 | 5.4 | 48 | 51 | 32 | 0 | 29 | 44 | 5 | + | 1-0-0- |
| | | GUGACCGUCC | | | | | | | | | | | | 3-71 |
| R223Q | SpBE3 | CGACACCGAA | (TAG) | C7 | 4.7 | 68 | 14 | 21 | 2 | 14 | 33 | 4 | − | 0-1-0- |
| | | GCAGAGUUUU | | | | | | | | | | | | 4-43 |
| P293S/L | SpBE3 | CCCAUCAUCU | (CGG) | C1/C2 | 6.3 | 58 | 44 | 2 | 5 | 18 | 35 | 6 | − | 0-1-2- |
| | | AUGCCUUUGU | | | | | | | | | | | | 23-127 |
| R223Q | SpBE3 | GACACCGAAG | (AGG) | C6 | 5.3 | 70 | 22 | 76 | 3 | 17 | 25 | 5 | − | 0-0-4- |
| | | CAGAGUUUUU | | | | | | | | | | | | 10-92 |
| Q261X | SpBE3 | AACACCUUCC | (TGG) | C10 | 7 | 34 | 31 | 15 | 13 | 41 | 21 | 7 | − | 1-0-3- |
| | | AGGAAUUCUU | | | | | | | | | | | | 29-202 |
| PI83S/L | SpBE3 | CAUACAGUCA | (TGG) | C1/−1 | 7.1 | 41 | 27 | 15 | 5 | 36 | 25 | 7 | − | 0-1-2- |
| | | GUAUCAAUUC | | | | | | | | | | | | 17-133 |

a)Base editors: SpBE3 = APOBEC1-SpCas9n-UGI; VQR-SpBE3 = APOBEC1-VQR-SpCas9n-UGI; EQR-SpBE3 = APOBEC1-EQR-SpCas9n-UGI; VRER-SpBE3 = APOBEC1-VRER-SpCas9n-UGI; SaBE3 = APOBEC1-SaCas9n-UGI; KKH-SaBE3 = APOBEC1-KKH-SaCas9n-UGI.
b)Efficiency score, based on Housden et al (Science Signaling, 2015, 8(393):rs9), which is herein incorporated by reference in its entirety.
c)Specificity scores based on Hsu et al (Nature biotechnology, 2013, 31(9):827-832), Fusi et al (bioRxiv 021568; doi: http://dx.doi.org/10.1101/021568), Chari et al (Nature Methods, 2015, 12(9):823-6), Doench et al (Nature Biotechnology, 2014, 32(12): 1262-7), Wang et al (Science, 2014, 343(6166):80-4), Moreno-Mateos et al (Nature Methods, 2015, 12(10):982-8), Housden et al (Science Signaling, 2015, 8(393):rs9), and the “Prox/GC” column show's “+” if the proximal 6 bp to the PAM has a GC count >= 4, and GG if the guide ends with GG, based on Farboud et al (Genetics, 2015, 199(4):959-71). Each of the foregoing references is hereby incorporated by reference in its entirety.
d)Number of predicted off-target binding sites in the human genome allowing up to 0, 1,2, 3 or 4 mismatches, respectively shown in the format 0-1-2-3-4. Algorithm used: Haeussler et al. Genome Biol. 2016; 17: 148, which is herein incorporated by reference in its entirety.

TABLE 9
Examples of specific guide RNA sequences used for making variants.
The guide RNA sequences, from top to bottom, correspond to
SEQ ID NOs: 637-657 and the CCR2 sequences, from top to bottom,
correspond to SEQ ID NOs: 658-678.

| | | | | | CCR2 seq. | | | | | | Off- |
|---|---|---|---|---|---|---|---|---|---|---|---|
| CCR5 | | guide RNA | | C | (gRNA | | | | | M. | targets^{c} |
| variant | Cas9-BE | sequence | PAM | target | mismatches) | (m) | Eff.^{a} | Hsu^{b} | Doench | -M. | (corrected) |
| C290Y/ | SpBE3 | GCAGCAGUGC | (GAG) | C5 | GCAGCAGTGA | 1 | 7.2 | 46 | 87 | 60 | 0-0-0- |
| C291Y | | GUCAUCCCAA | | | GTCATCCCAAGAG | | | | | | 8-88 |
| G44D/S | SaBE3 | AAAACCAAAG | (GTGAGT) | C5/C6 | AAAACCAAAGATGA | 0 | 4.6 | 44 | 54 | 45 | 0-0-0- |
| | | AUGAACACCA | | | ACACCAGCGAGT | | | | | | 13-190 |
| G163R/ | VQR-SpBE3 | GUAAAGAUGA | (AGAC) | C13 | GTAAAGATGATTC | 1 | 4.9 | 41 | 51 | 50 | 0-0-2- |
| E | | UUCCUGGGAG | | | CTGGGACAGAC | | | | | | 37-211 |
| G47S/D | VQR-SpBE3 | CAUGUUGCCC | (AGAT) | C8/C9 | CATGTTGCCCACA | 0 | 7.1 | 39 | 41 | 58 | 0-0-0- |
| | | ACAAAACCAA | | | AAACCAAAGAT | | | | | | 17-207 |
| G216S/ | VQR-SpBE3 | UAGGAUUCCC | (TGAC) | C8/C9 | CAGGATTCCCGAG | 1 | 7.7 | 45 | 27 | 46 | 0-0-0- |
| D | | GAGUAGCAGA | | | TAGCAGATGAC | | | | | | 5-99 |
| C290Y/ | SaBE3 | AUGCAGCAGU | (AAGAGT) | C4/C7 | ATGCAGCAGTGA | 1 | 8.2 | 65 | 8 | 62 | 0-0-0- |
| C291Y | | GCGUCAUCCC | | | GTCATCCCAAGAGT | | | | | | 2-26 |
| S149N | VQR-SpBE3 | ACUUGUCACC | (TGAC) | C2 | ACTTGTCACCACC | 0 | 7.4 | 40 | 23 | 51 | 0-0-0- |
| | | ACCCCAAAGG | | | CCAAAGGTGAC | | | | | | 10-148 |
| S149N | SpBE3 | CACACUUGUC | (AGG) | C5 | CACACTTGTCAC | 0 | 6.2 | 39 | 21 | 63 | 0-0-0- |
| | | ACCACCCCAA | | | CACCCCAAAGG | | | | | | 22-147 |
| C290Y/ | SpBE3 | AUGCAGCAGU | (AAG) | C4/C7 | ATGCAGCAGTGA | 1 | 8.2 | 59 | 7 | 62 | 0-0-1- |
| C291Y | | GCGUCAUCCC | | | GTCATCCCAAG | | | | | | 5-83 |
| G47S/D | VQR-SpBE3 | GUUGCCCACA | (TGAA) | C5/C6 | GTTGCCCACAAA | 0 | 5.1 | 37 | 24 | 32 | 0-1-1- |
| | | AAACCAAAGA | | | ACCAAAGATGAA | | | | | | 15-198 |
| P34S/L/ | SpBE3 | CCUGCCUCCG | (TGG) | C5-C9 | CCTGCCTCCGCT | 1 | 6.3 | 55 | 17 | 56 | 0-0-0- |
| P35S/L | | CUCUACUCAC | | | CTACTCGCTGG | | | | | | 26-175 |
| G216S/ | VQR-SpBE3 | UCCCGAGUAG | (TGAC) | C2/C3 | TCCCGAGTAGCA | 0 | 3.9 | 46 | 31 | 44 | 0-0-0- |
| D | | CAGAUGACCA | | | GATGACCATGAC | | | | | | 4-60 |
| C290Y/ | VQR-SpBE3 | UGCAGCAGUG | (AGAG) | C6 | TGCAGCAGTGA | 1 | 7.2 | 59 | 7 | 51 | 0-0-0- |
| C291Y | | CGUCAUCCCA | | | GTCATCCCAAGAG | | | | | | 7-73 |
| Q280X | SaBE3 | AUGCAGGUGA | (TGGGAT) | C4 | ACGCAGGTGACAG | 1 | 6.4 | 47 | 3 | 43 | 0-0-0- |
| | | CAGAGACUCU | | | AGACTCTTGGGAT | | | | | | 6-55 |
| Q261X | VQR-SpBE3 | CUUCCAGGAA | (TGAA) | C5 | CTTCCAGGAATTC | 1 | 6.3 | 56 | 7 | 27 | 0-0-2- |
| | | UUCUUUGGCC | | | TTCGGCCTGAA | | | | | | 20-207 |
| R223Q | SaBE3 | CGACACCGAA | (TAGGAT) | C7 | CGACACCGAAGCA | 1 | 4.7 | 77 | 3 | 33 | 0-0-0- |
| | | GCAGAGUUUU | | | GGGTTTTCAGGAT | | | | | | 0-11 |
| Q261X | SaBE3 | CCUUCCAGGA | (CTGAAT) | C6 | CCTTCCAGGAATT | 1 | 6.1 | 61 | 10 | 14 | 0-0-2- |
| | | AUUCUUUGGC | | | CTTCGGCCTGAGT | | | | | | 2-54 |
| G145R/ | SpBE3 | CACCCCAAAG | (TGG) | C5/C6 | CACCCCAAAGGTG | 0 | 5.4 | 48 | 0 | 44 | 0-0-0- |
| E | | GUGACCGUCC | | | ACCGTCCTGG | | | | | | 3-71 |
| R223Q | SpBE3 | CGACACCGAA | (TAG) | C7 | CGACACCGAAGC | 1 | 4.7 | 68 | 2 | 33 | 0-0-0- |
| | | GCAGAGUUUU | | | AGGGTTTTCAG | | | | | | 4-43 |
| P293S/ | SpBE3 | CCCAUCAUCU | (CGG) | C1/C2 | CCCATCATCTATG | 1 | 6.3 | 58 | 5 | 35 | 0-0-2 |
| L | | AUGCCUUUGU | | | CCTTCGTTGG | | | | | | 23-127 |
| Q261X | SpBE3 | AACACCUUCC | (TGG) | C10 | AACACCTTCCAGG | 0 | 7.0 | 34 | 13 | 21 | 0-0-3 |
| | | AGGAAUUCUU | | | AATTCTTCGG | | | | | | 29-202 |

a)Base editors: SpBE3 = APOBEC1-SpCas9n-UGI; VQR-SpBE3 = APOBEC1-VQR-SpCas9n-UGI; EQR-SpBE3 = APOBEC1-EQR-SpCas9n-UGI; VRER-SpBE3 = APOBEC1-VRER-SpCas9n-UGI; SaBE3 = APOBEC1-SaCas9n-UGI; KKH-SaBE3 = APOBEC1-KKH-SaCas9n-UGI.
b)Efficiency score, based on Housden et al (Science Signaling, 2015, 8(393):rs9), which is herein incorporated by reference in its entirety.
c)Specificity scores based on Hsu et al (Nature biotechnology, 2013, 31(9):827-832), Doench et al (Nature Biotechnology, 2014. 32(12): 1262-7), Moreno-Mateos et al (Nature Methods, 2015, 12(10):982-8), each of which is herein incorporated by reference in its entirety.
d)Number of predicted off-target binding sites in the human genome allowing up to 0, 1, 2, 3 or 4 mismatches, respectively shown in the format 0-1-2-3-4. These numbers were corrected to the CCR2 gene as an off-target, therefore, the specificity scores are expected to be higher. Algorithm used: Haeussler et al. Genome Biol. 2016; 17: 148, which is herein incorporated by reference in its entirety.

### REFERENCES

[0268] 1. Komor, A. C.; Kim, Y. B.; Packer, M. S.; Zuris, J. A.; Liu, D. R., Programmable editing of a target base in genomic DNA without double-stranded DNA cleavage. Nature 2016, advance online publication.
[0269] 2. (a) Cong. L.; Ran, F. A.; Cox, D.; Lin, S.; Barretto, R.; Habib. N.; Hsu. P. D.; Wu, X.; Jiang. W.; Marraffini, L. A.; Zhang, F., Multiplex genome engineering using CRISPR/Cas systems. Science 2013, 339 (6121), 819-23; (b) Jinek, M.; Chylinski, K.; Fonfara, I.; Hauer. M.; Doudna, J. A.; Charpentier. E., A programmable dual-RNA-guided DNA endonuclease in adaptive bacterial immunity. Science 2012, 337 (6096). 816-21; (c) Mali. P.; Yang. L.; Esvelt. K. M.; Aach, J.; Guell, M.; DiCarlo, J. E.; Norville, J. E.; Church, G. M., RNA-guided human genome engineering via Cas9. Science 2013, 339 (6121). 823-6.
[0270] 3. Ran, F. A.; Hsu, P. D.; Lin, C. Y.; Gootenberg, J. S.; Konermann, S.; Trevino, A. E.; Scott. D. A.; Inoue, A.; Matoba, S.; Zhang, Y.; Zhang, F., Double nicking by RNA-guided CRISPR Cas9 for enhanced genome editing specificity. Cell 2013, 154 (6), 1380-9.
[0271] 4. (a) Guilinger, J. P.; Thompson, D. B.; Liu, D. R., Fusion of catalytically inactive Cas9 to FokI nuclease improves the specificity of genome modification. Nature biotechnology 2014, 32 (6). 577-82; (b) Tsai. S. Q.; Wyvekens, N.; Khayter, C.; Foden, J. A.; Thapar, V.; Reyon. D.; Goodwin, M. J.; Aryee, M. J.; Joung, J. K., Dimeric CRISPR RNA-guided FokI nucleases for highly specific genome editing. Nature biotechnology 2014, 32 (6), 569-76.
[0272] 5. (a) Capoulade-Metay, C.; Ma, L.; Truong, L. X.; Dudoit, Y.; Versmisse, P.; Nguyen, N. V.; Nguyen, M.; Scott-Algara, D.; Barre-Sinoussi, F.; Debre, P.; Bismuth, G.; Pancino. G.; Theodorou, I., New CCR5 variants associated with reduced HIV coreceptor function in southeast Asia. AIDS 2004, 18 (17), 2243-52; (b) Carrington. M.; Kissner, T.; Gerrard, B.; Ivanov, S.; O'Brien. S. J.; Dean, M., Novel alleles of the chemokine-receptor gene CCR5. American journal of human genetics 1997, 61 (6), 1261-7; (c) Barmania. F.; Pepper, M. S., C-C chemokine receptor type five (CCR5): An emerging target for the control of HIV infection. Applied & Translational Genomics 2013, 2, 3-16; (d) Cox, D. B.; Platt, R. J.; Zhang, F., Therapeutic genome editing: prospects and challenges. Nature medicine 2015, 21 (2), 121-31; (e) Dean, M.; Carrington, M.; Winkler, C.; Huttley, G. A.; Smith, M. W.; Allikmets, R.; Goedert, J. J.; Buchbinder, S. P.; Vittinghoff, E.; Gomperts. E.; Donfield. S.; Vlahov, D.; Kaslow, R.; Saah, A.; Rinaldo, C.; Detels, R.; O'Brien, S. J., Genetic restriction of HIV-1 infection and progression to AIDS by a deletion allele of the CKR5 structural gene. Hemophilia Growth and Development Study, Multicenter AIDS Cohort Study. Multicenter Hemophilia Cohort Study, San Francisco City Cohort. ALIVE Study. Science 19%, 273 (5283), 1856-62.
[0273] 6. (a) Lee. B.; Doranz. B. J.; Rana. S.; Yi, Y.; Mellado. M.; Frade, J. M.; Martinez, A. C.; O'Brien, S. J.; Dean, M.; Coltman. R. G.; Doms, R. W., Influence of the CCR2-V64I polymorphism on human immunodeficiency virus type 1 coreceptor activity and on chemokine receptor function of CCR2b, CCR3, CCR5, and CXCR4. Journal of virology 1998, 72 (9). 7450-8; (b) Apostolakis, S.; Baritaki, S.; Krambovitis, E.; Spandidos, D. A., Distribution of HIV/AIDS protective SDF1, CCR5 and CCR2 gene variants within Cretan population. Journal of clinical virology: the official publication of the Pan American Society for Clinical Virology 2005, 34 (4), 310-4; (c) Nakayama. E. E.; Tanaka, Y.; Nagai, Y.; Iwamoto, A.; Shioda, T., A CCR2-V64I polymorphism affects stability of CCR2A isoform. AIDS 2004, 18 (5), 729-38.
[0274] 7. (a) Cradick, T. J.; Fine, E. J.; Antico, C. J.; Bao, G., CRISPR/Cas9 systems targeting β-globin and CCR5 genes have substantial off-target activity. Nucleic acids research 2013; (b) Holt. N.; Wang. J.; Kim. K.; Friedman, G.; Wang, X.; Taupin, V.; Crooks. G. M.; Kohn, D. B.; Gregory, P. D.; Holmes. M. C.; Cannon, P. M., Human hematopoietic stem/progenitor cells modified by zinc-finger nucleases targeted to CCR5 control HIV-1 in vivo. Nature biotechnology 2010, 28 (8), 839-47.
[0275] 8. Koonin, E. V.; Novozhilov, A. S., Origin and evolution of the genetic code: the universal enigma. IUBMB life 2009, 61 (2), 99-111.
[0276] 9. (a) Thomas, M. A.; Weston. B.; Joseph, M.; Wu, W.; Nekrutenko, A.; Tonellato. P. J., Evolutionary dynamics of oncogenes and tumor suppressor genes: higher intensities of purifying selection than other genes. Molecular biology and evolution 2003, 20 (6), 964-8; (b) Iengar, P., An analysis of substitution, deletion and insertion mutations in cancer genes. Nucleic acids research 2012, 40 (14), 6401-13.

[0277] All publications, patents, patent applications, publication, and database entries (e.g., sequence database entries) mentioned herein, e.g., in the Background. Summary. Detailed Description, Examples, and/or References sections, are hereby incorporated by reference in their entirety as if each individual publication, patent, patent application, publication, and database entry was specifically and individually incorporated herein by reference. In case of conflict, the present application, including any definitions herein, will control.

### EQUIVALENTS AND SCOPE

[0278] Those skilled in the art will recognize, or be able to ascertain using no more than routine experimentation, many equivalents of the embodiments described herein. The scope of the present disclosure is not intended to be limited to the above description, but rather is as set forth in the appended claims.

[0279] Articles such as “a,” “an,” and “the” may mean one or more than one unless indicated to the contrary or otherwise evident from the context. Claims or descriptions that include “or” between two or more members of a group are considered satisfied if one, more than one, or all of the group members are present, unless indicated to the contrary or otherwise evident from the context. The disclosure of a group that includes “or” between two or more group members provides embodiments in which exactly one member of the group is present, embodiments in which more than one members of the group are present, and embodiments in which all of the group members are present. For purposes of brevity those embodiments have not been individually spelled out herein, but it will be understood that each of these embodiments is provided herein and may be specifically claimed or disclaimed.

[0280] It is to be understood that the instant compositions and methods encompasses all variations, combinations, and permutations in which one or more limitation, element, clause, or descriptive term, from one or more of the claims or from one or more relevant portion of the description, is introduced into another claim. For example, a claim that is dependent on another claim can be modified to include one or more of the limitations found in any other claim that is dependent on the same base claim. Furthermore, where the claims recite a composition, it is to be understood that methods of making or using the composition according to any of the methods of making or using disclosed herein or according to methods known in the art, if any, are included, unless otherwise indicated or unless it would be evident to one of ordinary skill in the art that a contradiction or inconsistency would arise.

[0281] Where elements are presented as lists, e.g., in Markush group format, it is to be understood that every possible subgroup of the elements is also disclosed, and that any element or subgroup of elements can be removed from the group. It is also noted that the term “comprising” is intended to be open and permits the inclusion of additional elements or steps. It should be understood that, in general, where an embodiment, product, or method is referred to as comprising particular elements, features, or steps, embodiments, products, or methods that consist, or consist essentially of, such elements, features, or steps, are provided as well. For purposes of brevity those embodiments have not been individually spelled out herein, but it will be understood that each of these embodiments is provided herein and may be specifically claimed or disclaimed.

[0282] Where ranges are given, endpoints are included. Furthermore, it is to be understood that unless otherwise indicated or otherwise evident from the context and/or the understanding of one of ordinary skill in the art, values that are expressed as ranges can assume any specific value within the stated ranges in some embodiments, to the tenth of the unit of the lower limit of the range, unless the context clearly dictates otherwise. For purposes of brevity, the values in each range have not been individually spelled out herein, but it will be understood that each of these values is provided herein and may be specifically claimed or disclaimed. It is also to be understood that unless otherwise indicated or otherwise evident from the context and/or the understanding of one of ordinary skill in the art, values expressed as ranges can assume any subrange within the given range, wherein the endpoints of the subrange are expressed to the same degree of accuracy as the tenth of the unit of the lower limit of the range.

[0283] In addition, it is to be understood that any particular embodiment of the present compositions and methods may be explicitly excluded from any one or more of the claims. Where ranges are given, any value within the range may explicitly be excluded from any one or more of the claims. Any embodiment, element, feature, application, or aspect of the compositions and/or methods of the disclosure can be excluded from any one or more claims. For purposes of brevity, all of the embodiments in which one or more elements, features, purposes, or aspects is excluded are not set forth explicitly herein.

What is claimed is:

1. A method of editing a polynucleotide encoding a C-C chemokine receptor type five (CCR5) protein, the method comprising contacting the CCR5-encoding polynucleotide with:
(i) a fusion protein comprising: (a) a guide nucleotide sequence-programmable DNA binding protein domain; and (b) a cytosine deaminase domain; and
(ii) a guide nucleotide sequence targeting the fusion protein of (i) to a target cytosine (C) base in the CCR5-encoding polynucleotide;
wherein the contacting results in the deamination of the target C base by the fusion protein, resulting in a cytosine-guanine (C:G) to thymine-adenine pair (T:A) change in the CCR5-encoding polynucleotide.

2. The method of claim 1, wherein the guide nucleotide sequence-programmable DNA binding protein is a nickase.

3. The method of claim 2, wherein the nickase is a Cas9 nickase.

4. The method of claim 3, wherein the Cas9 nickase comprises a mutation corresponding to a D10A mutation or an H840A mutation in SEQ ID NO: 1.

5. The method of claim 4, wherein the Cas9 nickase comprises a mutation corresponding to the D10A mutation in SEQ ID NO: 1.

6. The method of claim 1, wherein the guide nucleotide sequence-programmable DNA binding protein domain is selected from the group consisting of: a nuclease inactive Cas9 (dCas9) domain, a nuclease inactive Cpf1 domain, a nuclease inactive Argonaute domain, and variants and combinations thereof.

7. The method of claim 6, wherein the guide nucleotide sequence-programmable DNA-binding protein domain comprises a nuclease inactive Cas9 (dCas9) domain.

8. The method of claim 7, wherein the amino acid sequence of the dCas9 domain comprises mutations corresponding to D10A and/or H840A mutation(s) in SEQ ID NO: 1.

9. The method of claim 8, wherein the amino acid sequence of the dCas9 domain comprises a mutation corresponding to a D10A mutation in SEQ ID NO: 1, and wherein the dCas9 domain comprises a histidine at the position corresponding to amino acid 840 of SEQ ID NO: 1.

10. The method of claim 6, wherein the guide nucleotide sequence-programmable DNA-binding protein domain comprises a nuclease inactive Cpf1 (dCpf1) domain.

11. The method of claim 10, wherein the dCpf1 domain is from a species of Acidaminococcus or Lachnospiraceae.

12. The method of claim 6, wherein the guide nucleotide sequence-programmable DNA-binding protein domain comprises a nuclease inactive Argonaute (dAgo) domain.

13. The method of claim 12, wherein the dAgo domain is from Natronobacterium gregoryi.

14. The method of any one of claims 1-13, wherein the cytosine deaminase domain comprises an apolipoprotein B mRNA-editing complex (APOBEC) family deaminase.

15. The method of any one of claims 1-14, wherein the cytosine deaminase is selected from the group consisting of APOBEC1, APOBEC2, APOBEC3A, APOBEC3B, APOBEC3C, APOBEC3D, APOBEC3F, APOBEC3G deaminase, APOBEC3H deaminase, APOBEC4 deaminase, activation-induced deaminase (AID), and pmCDA1.

16. The method of any one of claims 1-15, wherein the cytosine deaminase comprises an amino acid sequence of any one of SEQ ID NOs: 1-260, 270-292, or 315-323.

17. The method of any one of claims 1-16, wherein the fusion protein of (a) further comprises a uracil glycosylase inhibitor (UGI) domain.

18. The method of any one of claims 1-17, wherein the cytosine deaminase domain is fused to the N-terminus of the guide nucleotide sequence-programmable DNA-binding protein domain.

19. The method of claim 17 or 18, wherein the UGI domain is fused to the C-terminus of the guide nucleotide sequence-programmable DNA-binding protein domain.

20. The method of any one of claims 1-19, wherein the cytosine deaminase and the guide nucleotide sequence-programmable DNA-binding protein domain are fused via an optional linker.

21. The method of any one of claims 17-20, wherein the UGI domain is fused to the dCas9 domain via an optional linker.

22. The method of claim 21, wherein the fusion protein comprises the structure NH₂-[cytosine deaminase domain]-[optional linker sequence]-[guide nucleotide sequence-programmable DNA-binding protein domain]-[optional linker sequence]-[UGI domain]-COOH.

23. The method of claim 21, wherein the fusion protein comprises the structure NH₂-[UGI domain]-[optional linker sequence]-[cytosine deaminase domain]-[optional linker sequence]-[guide nucleotide sequence-programmable DNA-binding protein domain]-COOH.

24. The method of any one of claims 20-23, wherein the linker comprises (GGGS)ₙ (SEQ ID NO: 303), (GGGGS)ₙ (SEQ ID NO: 304), (G)ₙ, (EAAAK)ₙ (SEQ ID NO: 305), (GGS)ₙ, SGSETPGTSESATPES (SEQ ID NO: 306), or an (XP)ₙ motif, or a combination of any of these, wherein n is independently an integer between 1 and 30, and wherein X is any amino acid.

25. The method of any one of claims 20-23, wherein the linker is unstructured, structured, helical, or extended.

26. The method of claim 24, wherein the linker comprises the amino acid sequence SGSETPGTSESATPES (SEQ ID NO: 306).

27. The method of claim 24, wherein the linker is (GGS)ₙ, and wherein n is 1, 3, or 7.

28. The method of any one of claims 1-27, wherein the fusion protein comprises the amino acid sequence of any one of SEQ ID NO: 293-302.

29. The method of any one of claims 1-28, wherein the fusion protein of (i) further comprises a Gam protein.

30. The method of claim 29, wherein the Gam protein comprises the amino acid sequence of any one of SEQ ID NOs: 710-734.

31. The method of any one of claims 1-30, wherein the polynucleotide encoding the CCR5 protein comprises a coding strand and a complementary strand.

32. The method of any one of claims 1-31, wherein the polynucleotide encoding the CCR5 protein comprises a coding region and a non-coding region.

33. The method of any one of claims 1-32, wherein the C to T change occurs in the coding sequence of the CCR5-encoding polynucleotide.

34. The method of claim 33, wherein the C to T change leads to a mutation in the CCR5 protein.

35. The method of claim 34, wherein the mutation in the CCR5 protein is a loss-of-function mutation.

36. The method of claim 34 or 35, wherein the mutation is selected from the mutations listed in Tables 1-9.

37. The method of any one of claims 1-36, wherein the guide nucleotide sequence is selected from the guide nucleotide sequences listed in Tables 3-5 and 8-9.

38. The method of any one of claims 35-37, wherein the loss-of-function mutation introduces a premature stop codon in the CCR5 coding sequence that leads to a truncated or non-functional CCR5 protein.

39. The method of claim 38, wherein the premature stop codon is TAG (Amber), TGA (Opal), or TAA (Ochre).

40. The method of claim 38 or 39, wherein the premature stop codon is generated from a CAG to TAG change via the deamination of the first C on the coding strand.

41. The method of claim 38 or 39, wherein the premature stop codon is generated from a CGA to TGA change via the deamination of the first C on the coding strand.

42. The method of claim 38 or 39, wherein the premature stop codon is generated from a CAA to TAA change via the deamination of the first C on the coding strand.

43. The method of claim 38 or 39, wherein the premature stop codon is generated from a TGG to TAG change via the deamination of the second C on the complementary strand.

44. The method of claim 38 or 39, wherein the premature stop codon is generated from a TGG to TGA change via the deamination of the third C on the complementary strand.

45. The method of claim 38 or 39, wherein the premature stop codon is generated from a TGG to TAA change via the deamination of the second C and third C on the complementary strand.

46. The method of claim 38 or 39, wherein the premature stop codon is generated from a CGG to TAG or CGA to TAA change via the deamination of C on the coding strand and the deamination of C on the complementary strand.

47. The method of any one of claims 39-46, wherein the guide nucleotide sequence is selected from the guide nucleotide sequences (SEQ ID NO: 471-657) listed in Table 5, Table 8, or Table 9.

48. The method of claim 39, wherein tandem premature stop codons are introduced.

49. The method of claim 48, wherein the mutation is selected from the group consisting of: Q186/Q188, Q277/Q288, Q328/Q329, Q329/R334, or R341/Q346.

50. The method of claim 49, wherein the guide nucleotide sequence is selected from the group consisting of: SEQ ID NOs: 381-657.

51. The method of any one of claims 35-50, wherein the loss-of-function mutation destabilizes CCR5 protein folding.

52. The method of claim 51, wherein the loss-of-function mutation is selected from the mutations listed in Tables 1, 4, 8, or 9.

53. The method of claim 52, wherein the guide nucleotide sequence is selected from the guide nucleotide sequences listed in Tables 3, 4, 8 or 9 (SEQ ID NO: 381-410, 411-470).

54. The method of any one of claims 1-30, wherein the C to T change modifies a splicing site in the non-coding region of the CCR5-encoding polynucleotide.

55. The method of claim 54, wherein the C to T change modifies an intron-exon junction.

56. The method of claim 54, wherein the C to T change modifies a splicing donor site.

57. The method of claim 54, wherein the C to T change modifies a splicing acceptor site.

58. The method of claim 54, wherein the C to T changes occurs at a C base-paired with the G base in a start codon (AUG).

59. The method of any one of claims 54-58, wherein the C to T change prevents CCR5 mRNA maturation or abrogates CCR5 expression.

60. The method of claim 54-59, wherein the C to T change is selected from the C to T changes listed in Table 2, 8 or 9.

61. The method of any one of claims 54-60, wherein the guide nucleotide sequence is selected from the guide nucleotide sequences (SEQ ID NOs: 577-657) listed in Tables 8 and 9.

62. The method of any one of claims 1-30, wherein the C to T change results in a codon change in the CCR5-encoding polynucleotide listed in Table 8 or 9.

63. The method of any one of claims 1-62, wherein a PAM sequence is located 3′ of the C being changed.

64. The method of claim 63, wherein the PAM sequence is selected from the group consisting of: NGG, NGAN, NGNG, NGAG, NGCG, NNGRRT, NGRRN, NNNRRT, NNNGATT, NNAGAA, NAAAC, NNT, NNNT, and YNT, wherein Y is pyrimidine, R is purine, and N is any nucleobase.

65. The method of any one of claims 1-62, wherein no PAM sequence is located 3′ of the C being changed.

66. The method of any of claim 1-65, wherein at least 1, 2, 3, 4, 5, 6, 7, 8, 9, or 10 mutations are introduced into the CCR5-encoding polynucleotide.

67. The method of any one of claims 1-66, wherein the guide nucleotide sequence is RNA (gRNA).

68. The method of any one of claims 1-66, wherein the guide nucleotide sequence is ssDNA (gDNA).

69. A method of editing a polynucleotide encoding a C-C chemokine receptor type 2 (CCR2) protein, the method comprising contacting the CCR2-encoding polynucleotide with:
(i) a fusion protein comprising: (a) a guide nucleotide sequence-programmable DNA binding protein domain; and (b) a cytosine deaminase domain, and
(ii) a guide nucleotide sequence targeting the fusion protein of (i) to a target cytosine (C) base in the CCR2-encoding polynucleotide,
wherein the contacting results in the deamination of the target C base by the fusion protein, resulting in a cytosine-guanine (C:G) to thymine-adenine pair (T:A) change in the CCR2-encoding polynucleotide.

70. The method of claim 69, wherein the C to T change is in the coding sequence of the CCR2-encoding polynucleotide.

71. The method of claim 69 or 70, wherein the C to T change leads to leads to a mutation in the CCR2 protein.

72. The method of claim 71, wherein the mutation in the CCR2 protein is a loss-of-function mutation.

73. The method of claim 71 or 72, wherein the mutation is selected from the mutations listed in Table 1.

74. The method of claims 1-73, wherein the method is carried out in vitro.

75. The method of claim 74, wherein the method is carried out in a cultured cell.

76. The method of any one of claims 1-73, wherein the method is carried out in vivo.

77. The method of any one of claims 1-73, wherein the method is carried out ex vivo.

78. The method of claim 76, wherein the method is carried out in a mammal.

79. The method of claim 76 or 78, wherein the mammal is a rodent.

80. The method of claim 76 or 78, wherein the mammal is human.

81. A method of editing a polynucleotide encoding a C-C chemokine receptor type five (CCR2) protein, the method comprising contacting the CCR2-encoding polynucleotide with:
(i) a fusion protein comprising: (a) a guide nucleotide sequence-programmable DNA binding protein domain; and (b) a cytosine deaminase domain; and
(ii) a guide nucleotide sequence targeting the fusion protein of (i) to a target cytosine (C) base in the CCR2-encoding polynucleotide;
wherein the contacting results in the deamination of the target C base by the fusion protein, resulting in a cytosine-guanine (C:G) to thymine-adenine pair (T:A) change in the CCR2-encoding polynucleotide.

82. The method of claim 81, wherein the guide nucleotide sequence-programmable DNA binding protein domain is selected from the group consisting of: a nuclease inactive Cas9 (dCas9) domain, a nuclease inactive Cpf1 domain, a nuclease inactive Argonaute domain, and variants and combinations thereof.

83. The method of claim 81 or 82, wherein the guide nucleotide sequence-programmable DNA-binding protein domain comprises a nuclease inactive Cas9 (dCas9) domain.

84. The method of claim 83, wherein the amino acid sequence of the dCas9 domain comprises mutations corresponding to D10A and/or H840A mutation(s) in SEQ ID NO: 1.

85. The method of claim 84, wherein the amino acid sequence of the dCas9 domain comprises a mutation corresponding to a D10A mutation in SEQ ID NO: 1, and wherein the dCas9 domain comprises a histidine at the position corresponding to amino acid 840 of SEQ ID NO: 1.

86. The method of claim 81 or 82, wherein the guide nucleotide sequence-programmable DNA-binding protein domain comprises a nuclease inactive Cpf1 (dCpf1) domain.

87. The method of claim 86, wherein the dCpf1 domain is from a species of Acidaminococcus or Lachnospiraceae.

88. The method of claim 81 or 82, wherein the guide nucleotide sequence-programmable DNA-binding protein domain comprises a nuclease inactive Argonaute (dAgo) domain.

89. The method of claim 88, wherein the dAgo domain is from Natronobacterium gregoryi.

90. The method of any one of claims 81-89, wherein the cytosine deaminase domain comprises an apolipoprotein B mRNA-editing complex (APOBEC) family deaminase.

91. The method of any one of claims 81-90, wherein the cytosine deaminase is selected from the group consisting of APOBEC1, APOBEC2, APOBEC3A, APOBEC3B, APOBEC3C, APOBEC3D, APOBEC3F, APOBEC3G deaminase, APOBEC3H deaminase, APOBEC4 deaminase, activation-induced deaminase (AID), and pmCDA1.

92. The method of any one of claims 81-91, wherein the cytosine deaminase comprises an amino acid sequence of any one of SEQ ID NOs: 1-260, 270-292, or 315-323.

93. The method of any one of claims 81-92, wherein the fusion protein of (a) further comprises a uracil glycosylase inhibitor (UGI) domain.

94. The method of any one of claims 81-93, wherein the cytosine deaminase domain is fused to the N-terminus of the guide nucleotide sequence-programmable DNA-binding protein domain.

95. The method of claim 93 or 94, wherein the UGI domain is fused to the C-terminus of the guide nucleotide sequence-programmable DNA-binding protein domain.

96. The method of any one of claims 81-95, wherein the cytosine deaminase and the guide nucleotide sequence-programmable DNA-binding protein domain are fused via an optional linker.

97. The method of any one of claims 93-96, wherein the UGI domain is fused to the dCas9 domain via an optional linker.

98. The method of claim 97, wherein the fusion protein comprises the structure NH₂-[cytosine deaminase domain]-[optional linker sequence]-[guide nucleotide sequence-programmable DNA-binding protein domain]-[optional linker sequence]-[UGI domain]-COOH.

99. The method of claim 97, wherein the fusion protein comprises the structure NH₂-[UGI domain]-[optional linker sequence]-[cytosine deaminase domain]-[optional linker sequence]-[guide nucleotide sequence-programmable DNA-binding protein domain]-COOH.

100. The method of any one of claims 98-99, wherein the linker comprises (GGGS)ₙ(SEQ ID NO: 303), (GGGGS)ₙ (SEQ ID NO: 304), (G)ₙ, (EAAAK)ₙ (SEQ ID NO: 305), (GGS)ₙ, SGSETPGTSESATPES (SEQ ID NO: 306), or an (XP)ₙ motif, or a combination of any of these, wherein n is independently an integer between 1 and 30, and wherein X is any amino acid.

101. The method of any one of claims 98-99, wherein the linker is unstructured, structured, helical, or extended.

102. The method of claim 100, wherein the linker comprises the amino acid sequence SGSETPGTSESATPES (SEQ ID NO: 306).

103. The method of claim 100, wherein the linker is (GGS)ₙ, and wherein n is 1, 3, or 7.

104. A composition comprising:
(i) a fusion protein comprising: (a) a guide nucleotide sequence-programmable DNA binding protein domain; and (b) a cytosine deaminase domain; and
(ii) a guide nucleotide sequence targeting the fusion protein of (i) to a polynucleotide encoding a C-C chemokine receptor type five (CCR5) protein.

105. A composition comprising:
(i) a fusion protein comprising: (a) a guide nucleotide sequence-programmable DNA binding protein domain; and (b) a cytosine deaminase domain; and
(ii) a guide nucleotide sequence targeting the fusion protein of (i) to a polynucleotide encoding a C-C chemokine receptor type two (CCR2) protein.

106. A composition comprising:
(i) a fusion protein comprising: (a) a guide nucleotide sequence-programmable DNA binding protein domain; and (b) a cytosine deaminase domain;
(ii) a guide nucleotide sequence targeting the fusion protein of (i) to a polynucleotide encoding a C-C chemokine receptor type five (CCR5) protein; and
(iii) a guide nucleotide sequence targeting the fusion protein of (i) to a polynucleotide encoding a C-C chemokine receptor type 2 (CCR2) protein.

107. The method of claim 1, wherein the guide nucleotide sequence-programmable DNA binding protein is a nickase.

108. The method of claim 107, wherein the nickase is a Cas9 nickase.

109. The method of claim 108, wherein the Cas9 nickase comprises a mutation corresponding to a D10A mutation or an H840A mutation in SEQ ID NO: 1.

110. The method of claim 109, wherein the Cas9 nickase comprises a mutation corresponding to the D10A mutation in SEQ ID NO: 1.

111. The composition of any one of claims 104-110, wherein the guide nucleotide sequence of (ii) is selected from SEQ ID NOs: 381-657.

112. The composition of any one of claims 104-111 further comprising a pharmaceutically acceptable carrier.

113. A method of reducing the binding of gp120 and CCR5 in a subject, the method comprising administering to a subject in need thereof a therapeutically effective amount of the composition of any one of claims 104-112.

114. A method of reducing virus binding to CCR5 in a subject, the method comprising administering to a subject in need thereof a therapeutically effective amount of the composition of any one of claims 104-112.

115. A method of reducing viral infection in a subject, the method comprising administering to a subject in need thereof a therapeutically effective amount of the composition of any one of claims 104-112.

116. A method of reducing functional CCR5 receptors on a cell in a subject, the method comprising administering to a subject in need thereof a therapeutically effective amount of the composition of any one of claims 104-112.

117. The method of claim C2, wherein the cell is selected from the group consisting of: macrophage, dendritic cell, memory T cell, endothelial cell, epithelial cell, vascular smooth muscle cell, fibroblast, microglia, neuron, and astrocyte.

118. A method of treating a condition, the method comprising administering to a subject in need thereof a therapeutically effective amount of the composition of any one of claims 104-112, wherein the condition is human immunodeficiency virus (HIV) infection, re-infection, or activation from latency, acquired immune deficiency syndrome (AIDS), an immunologic disease, or a combination thereof.

119. The method of claim 118, wherein the condition is human immunodeficiency virus (HIV) infection.

120. The method of claim 18, wherein the condition is latent human immunodeficiency virus (HIV).

121. The method of claim 118, wherein the condition is a virus that targets CCR5 on white blood cells.

122. A method of preventing a condition, the method comprising administering to a subject in need thereof a therapeutically effective amount of the composition of any one of claims 104-112, wherein the condition is human immunodeficiency virus (HIV) infection, re-infection, or activation from latency, acquired immune deficiency syndrome (AIDS), an immunologic disease, or a combination thereof.

123. The method of claim 122, wherein the condition is human immunodeficiency virus (HIV) infection.

124. The method of claim 122, wherein the condition is latent human immunodeficiency virus (HIV).

125. The method of claim 122, wherein the condition is a virus that targets CCR5 on white blood cells.

126. A kit comprising the composition of any one of claims 104-112.

The application's sequence listing, which the Patent Office published only in electronic form, follows.

SEQUENCE LISTING (741 sequences)

SEQ ID NO: 1 - protein, 1368 aa, Streptococcus pyogenes [sequence omitted]

SEQ ID NO: 2 - protein, 1360 aa, synthetic construct
  REGION 1..1360: note = Synthetic Polypeptide
MDKKYSIGLAIGTNSVGWAVITDEYKVPSKKFKVLGNTDRHSIKKNLIGALLFDSGETAEATRLKRTARRRYTRRKNRICYLQEIFSNEMAKVDDSFFHRLEESFLVEEDKKHERHPIFGNIVDEVAYHEKYPTIYHLRKKLVDSTDKADLRLIYLALAHMIKFRGHFLIEGDLNPDNSDVDKLFIQLVQTYNQLFEENPINASGVDAKAILSARLSKSRRLENLIAQLPGEKKNGLFGNLIALSLGLTPNFKSNFDLAEDAKLQLSKDTYDDDLDNLLAQIGDQYADLFLAAKNLSDAILLSDILRVNTEITKAPLSASMIKRYDEHHQDLTLLKALVRQQLPEKYKEIFFDQSKNGYAGYIDGGASQEEFYKFIKPILEKMDGTEELLVKLNREDLLRKQRTFDNGSIPHQIHLGELHAILRRQEDFYPFLKDNREKIEKILTFRIPYYVGPLARGNSRFAWMTRKSEETITPWNFEEVVDKGASAQSFIERMTNFDKNLPNEKVLPKHSLLYEYFTVYNELTKVKYVTEGMRKPAFLSGEQKKAIVDLLFKTNRKVTVKQLKEDYFKKIECFDSVEISGVEDRFNASLGTYHDLLKIIKDKDFLDNEENEDILEDIVLTLTLFEDREMIEERLKTYAHLFDDKVMKQLKRRRYTGWGRLSRKLINGIRDKQSGKTILDFLKSDGFANRNFMQLIHDDSLTFKEDIQKAQVSGQGDSLHEHIANLAGSPAIKKGILQTVKVVDELVKVMGRHKPENIVIEMARENQTTQKGQKNSRERMKRIEEGIKELGSQILKEHPVENTQLQNEKLYLYYLQNGRDMYVDQELDINRLSDYDVDAIVPQSFLKDDSIDNKVLTRSDKNRGKSDNVPSEEVVKKMKNYWRQLLNAKLITQRKFDNLTKAERGGLSELDKAGFIKRQLVETRQITKHVAQILDSRMNTKYDENDKLIREVKVITLKSKLVSDFRKDFQFYKVREINNYHHAHDAYLNAVVGTALIKKYPKLESEFVYGDYKVYDVRKMIAKSEQEIGKATAKYFFYSNIMNFFKTEITLANGEIRKRPLIETNGETGEIVWDKGRDFATVRKVLSMPQVNIVKKTEVQTGGFSKESILPKRNSDKLIARKKDWDPKKYGGFDSPTVAYSVLVVAKVEKGKSKKLKSVKELLGITIMERSSFEKNPIDFLEAKGYKEVKKDLIIKLPKYSLFELENGRKRMLASAGELQKGNELALPSKYVNFLYLASHYEKLKGSPEDNEQKQLFVEQHKHYLDEIIEQISEFSKRVILADANLDKVLSAYNKHRDKPIREQAENIIHLFTLTNLGAPAAFKYFDTTIDRKRYTSTKEVLDATLIHQSITGLYETRI

SEQ ID NO: 3 - protein, 1368 aa, Streptococcus pyogenes
MDKKYSIGLAIGTNSVGWAVITDEYKVPSKKFKVLGNTDRHSIKKNLIGALLFDSGETAEATRLKRTARRRYTRRKNRICYLQEIFSNEMAKVDDSFFHRLEESFLVEEDKKHERHPIFGNIVDEVAYHEKYPTIYHLRKKLVDSTDKADLRLIYLALAHMIKFRGHFLIEGDLNPDNSDVDKLFIQLVQTYNQLFEENPINASGVDAKAILSARLSKSRRLENLIAQLPGEKKNGLFGNLIALSLGLTPNFKSNFDLAEDAKLQLSKDTYDDDLDNLLAQIGDQYADLFLAAKNLSDAILLSDILRVNTEITKAPLSASMIKRYDEHHQDLTLLKALVRQQLPEKYKEIFFDQSKNGYAGYIDGGASQEEFYKFIKPILEKMDGTEELLVKLNREDLLRKQRTFDNGSIPHQIHLGELHAILRRQEDFYPFLKDNREKIEKILTFRIPYYVGPLARGNSRFAWMTRKSEETITPWNFEEVVDKGASAQSFIERMTNFDKNLPNEKVLPKHSLLYEYFTVYNELTKVKYVTEGMRKPAFLSGEQKKAIVDLLFKTNRKVTVKQLKEDYFKKIECFDSVEISGVEDRFNASLGTYHDLLKIIKDKDFLDNEENEDILEDIVLTLTLFEDREMIEERLKTYAHLFDDKVMKQLKRRRYTGWGRLSRKLINGIRDKQSGKTILDFLKSDGFANRNFMQLIHDDSLTFKEDIQKAQVSGQGDSLHEHIANLAGSPAIKKGILQTVKVVDELVKVMGRHKPENIVIEMARENQTTQKGQKNSRERMKRIEEGIKELGSQILKEHPVENTQLQNEKLYLYYLQNGRDMYVDQELDINRLSDYDVDHIVPQSFLKDDSIDNKVLTRSDKNRGKSDNVPSEEVVKKMKNYWRQLLNAKLITQRKFDNLTKAERGGLSELDKAGFIKRQLVETRQITKHVAQILDSRMNTKYDENDKLIREVKVITLKSKLVSDFRKDFQFYKVREINNYHHAHDAYLNAVVGTALIKKYPKLESEFVYGDYKVYDVRKMIAKSEQEIGKATAKYFFYSNIMNFFKTEITLANGEIRKRPLIETNGETGEIVWDKGRDFATVRKVLSMPQVNIVKKTEVQTGGFSKESILPKRNSDKLIARKKDWDPKKYGGFDSPTVAYSVLVVAKVEKGKSKKLKSVKELLGITIMERSSFEKNPIDFLEAKGYKEVKKDLIIKLPKYSLFELENGRKRMLASAGELQKGNELALPSKYVNFLYLASHYEKLKGSPEDNEQKQLFVEQHKHYLDEIIEQISEFSKRVILADANLDKVLSAYNKHRDKPIREQAENIIHLFTLTNLGAPAAFKYFDTTIDRKRYTSTKEVLDATLIHQSITGLYETRIDLSQLGGD

SEQ ID NO: 4 - DNA, 4107 bp, Streptococcus pyogenes
  source 1..4107: mol_type = genomic DNA
atggataagaaatactcaataggcttagatatcggcacaaatagcgtcggatgggcggtgatcactgatgaatataaggttccgtctaaaaagttcaaggttctgggaaatacagaccgccacagtatcaaaaaaaatcttataggggctcttttatttgacagtggagagacagcggaagcgactcgtctcaaacggacagctcgtagaaggtatacacgtcggaagaatcgtatttgttatctacaggagattttttcaaatgagatggcgaaagtagatgatagtttctttcatcgacttgaagagtcttttttggtggaagaagacaagaagcatgaacgtcatcctatttttggaaatatagtagatgaagttgcttatcatgagaaatatccaactatctatcatctgcgaaaaaaattggtagattctactgataaagcggatttgcgcttaatctatttggccttagcgcatatgattaagtttcgtggtcattttttgattgagggagatttaaatcctgataatagtgatgtggacaaactatttatccagttggtacaaacctacaatcaattatttgaagaaaaccctattaacgcaagtggagtagatgctaaagcgattctttctgcacgattgagtaaatcaagacgattagaaaatctcattgctcagctccccggtgagaagaaaaatggcttatttgggaatctcattgctttgtcattgggtttgacccctaattttaaatcaaattttgatttggcagaagatgctaaattacagctttcaaaagatacttacgatgatgatttagataatttattggcgcaaattggagatcaatatgctgatttgtttttggcagctaagaatttatcagatgctattttactttcagatatcctaagagtaaatactgaaataactaaggctcccctatcagcttcaatgattaaacgctacgatgaacatcatcaagacttgactcttttaaaagctttagttcgacaacaacttccagaaaagtataaagaaatcttttttgatcaatcaaaaaacggatatgcaggttatattgatgggggagctagccaagaagaattttataaatttatcaaaccaattttagaaaaaatggatggtactgaggaattattggtgaaactaaatcgtgaagatttgctgcgcaagcaacggacctttgacaacggctctattccccatcaaattcacttgggtgagctgcatgctattttgagaagacaagaagacttttatccatttttaaaagacaatcgtgagaagattgaaaaaatcttgacttttcgaattccttattatgttggtccattggcgcgtggcaatagtcgttttgcatggatgactcggaagtctgaagaaacaattaccccatggaattttgaagaagttgtcgataaaggtgcttcagctcaatcatttattgaacgcatgacaaactttgataaaaatcttccaaatgaaaaagtactaccaaaacatagtttgctttatgagtattttacggtttataacgaattgacaaaggtcaaatatgttactgaaggaatgcgaaaaccagcatttctttcaggtgaacagaagaaagccattgttgatttactcttcaaaacaaatcgaaaagtaaccgttaagcaattaaaagaagattatttcaaaaaaatagaatgttttgatagtgttgaaatttcaggagttgaagatagatttaatgcttcattaggtacctaccatgatttgctaaaaattattaaagataaagattttttggataatgaagaaaatgaagatatcttagaggatattgttttaacattgaccttatttgaagatagggagatgattgaggaaagacttaaaacatatgctcacctctttgatgataaggtgatgaaacagcttaaacgtcgccgttatactggttggggacgtttgtctcgaaaattgattaatggtattagggataagcaatctggcaaaacaatattagattttttgaaatcagatggttttgccaatcgcaattttatgcagctgatccatgatgatagtttgacatttaaagaagacattcaaaaagcacaagtgtctggacaaggcgatagtttacatgaacatattgcaaatttagctggtagccctgctattaaaaaaggtattttacagactgtaaaagttgttgatgaattggtcaaagtaatggggcggcataagccagaaaatatcgttattgaaatggcacgtgaaaatcagacaactcaaaagggccagaaaaattcgcgagagcgtatgaaacgaatcgaagaaggtatcaaagaattaggaagtcagattcttaaagagcatcctgttgaaaatactcaattgcaaaatgaaaagctctatctctattatctccaaaatggaagagacatgtatgtggaccaagaattagatattaatcgtttaagtgattatgatgtcgatcacattgttccacaaagtttccttaaagacgattcaatagacaataaggtcttaacgcgttctgataaaaatcgtggtaaatcggataacgttccaagtgaagaagtagtcaaaaagatgaaaaactattggagacaacttctaaacgccaagttaatcactcaacgtaagtttgataatttaacgaaagctgaacgtggaggtttgagtgaacttgataaagctggttttatcaaacgccaattggttgaaactcgccaaatcactaagcatgtggcacaaattttggatagtcgcatgaatactaaatacgatgaaaatgataaacttattcgagaggttaaagtgattaccttaaaatctaaattagtttctgacttccgaaaagatttccaattctataaagtacgtgagattaacaattaccatcatgcccatgatgcgtatctaaatgccgtcgttggaactgctttgattaagaaatatccaaaacttgaatcggagtttgtctatggtgattataaagtttatgatgttcgtaaaatgattgctaagtctgagcaagaaataggcaaagcaaccgcaaaatatttcttttactctaatatcatgaacttcttcaaaacagaaattacacttgcaaatggagagattcgcaaacgccctctaatcgaaactaatggggaaactggagaaattgtctgggataaagggcgagattttgccacagtgcgcaaagtattgtccatgccccaagtcaatattgtcaagaaaacagaagtacagacaggcggattctccaaggagtcaattttaccaaaaagaaattcggacaagcttattgctcgtaaaaaagactgggatccaaaaaaatatggtggttttgatagtccaacggtagcttattcagtcctagtggttgctaaggtggaaaaagggaaatcgaagaagttaaaatccgttaaagagttactagggatcacaattatggaaagaagttcctttgaaaaaaatccgattgactttttagaagctaaaggatataaggaagttaaaaaagacttaatcattaaactacctaaatatagtctttttgagttagaaaacggtcgtaaacggatgctggctagtgccggagaattacaaaaaggaaatgagctggctctgccaagcaaatatgtgaattttttatatttagctagtcattatgaaaagttgaagggtagtccagaagataacgaacaaaaacaattgtttgtggagcagcataagcattatttagatgagattattgagcaaatcagtgaattttctaagcgtgttattttagcagatgccaatttagataaagttcttagtgcatataacaaacatagagacaaaccaatacgtgaacaagcagaaaatattattcatttatttacgttgacgaatcttggagctcccgctgcttttaaatattttgatacaacaattgatcgtaaacgatatacgtctacaaaagaagttttagatgccactcttatccatcaatccatcactggtctttatgaaacacgcattgatttgagtcagctaggaggtgactga

SEQ ID NO: 5 - protein, 1053 aa, Staphylococcus aureus
MKRNYILGLDIGITSVGYGIIDYETRDVIDAGVRLFKEANVENNEGRRSKRGARRLKRRRRHRIQRVKKLLFDYNLLTDHSELSGINPYEARVKGLSQKLSEEEFSAALLHLAKRRGVHNVNEVEEDTGNELSTKEQISRNSKALEEKYVAELQLERLKKDGEVRGSINRFKTSDYVKEAKQLLKVQKAYHQLDQSFIDTYIDLLETRRTYYEGPGEGSPFGWKDIKEWYEMLMGHCTYFPEELRSVKYAYNADLYNALNDLNNLVITRDENEKLEYYEKFQIIENVFKQKKKPTLKQIAKEILVNEEDIKGYRVTSTGKPEFTNLKVYHDIKDITARKEIIENAELLDQIAKILTIYQSSEDIQEELTNLNSELTQEEIEQISNLKGYTGTHNLSLKAINLILDELWHTNDNQIAIFNRLKLVPKKVDLSQQKEIPTTLVDDFILSPVVKRSFIQSIKVINAIIKKYGLPNDIIIELAREKNSKDAQKMINEMQKRNRQTNERIEEIIRTTGKENAKYLIEKIKLHDMQEGKCLYSLEAIPLEDLLNNPFNYEVDHIIPRSVSFDNSFNNKVLVKQEENSKKGNRTPFQYLSSSDSKISYETFKKHILNLAKGKGRISKTKKEYLLEERDINRFSVQKDFINRNLVDTRYATRGLMNLLRSYFRVNNLDVKVKSINGGFTSFLRRKWKFKKERNKGYKHHAEDALIIANADFIFKEWKKLDKAKKVMENQMFEEKQAESMPEIETEQEYKEIFITPHQIKHIKDFKDYKYSHRVDKKPNRELINDTLYSTRKDDKGNTLIVNNLNGLYDKDNDKLKKLINKSPEKLLMYHHDPQTYQKLKLIMEQYGDEKNPLYKYYEETGNYLTKYSKKDNGPVIKKIKYYGNKLNAHLDITDDYPNSRNKVVKLSLKPYRFDVYLDNGVYKFVTVKNLDVIKKENYYEVNSKCYEEAKKLKKISNQAEFIASFYNNDLIKINGELYRVIGVNNDLLNRIEVNMIDITYREYLENMNDKRPPRIIKTIASKTQSIKKYSTDILGNLYEVKSKKHPQIIKKG

SEQ ID NO: 6 - protein, 1053 aa, Staphylococcus aureus; identical to SEQ ID NO: 5

SEQ ID NO: 7 - protein, 1368 aa, Streptococcus pyogenes
MDKKYSIGLDIGTNSVGWAVITDEYKVPSKKFKVLGNTDRHSIKKNLIGALLFDSGETAEATRLKRTARRRYTRRKNRICYLQEIFSNEMAKVDDSFFHRLEESFLVEEDKKHERHPIFGNIVDEVAYHEKYPTIYHLRKKLVDSTDKADLRLIYLALAHMIKFRGHFLIEGDLNPDNSDVDKLFIQLVQTYNQLFEENPINASGVDAKAILSARLSKSRRLENLIAQLPGEKKNGLFGNLIALSLGLTPNFKSNFDLAEDAKLQLSKDTYDDDLDNLLAQIGDQYADLFLAAKNLSDAILLSDILRVNTEITKAPLSASMIKRYDEHHQDLTLLKALVRQQLPEKYKEIFFDQSKNGYAGYIDGGASQEEFYKFIKPILEKMDGTEELLVKLNREDLLRKQRTFDNGSIPHQIHLGELHAILRRQEDFYPFLKDNREKIEKILTFRIPYYVGPLARGNSRFAWMTRKSEETITPWNFEEVVDKGASAQSFIERMTNFDKNLPNEKVLPKHSLLYEYFTVYNELTKVKYVTEGMRKPAFLSGEQKKAIVDLLFKTNRKVTVKQLKEDYFKKIECFDSVEISGVEDRFNASLGTYHDLLKIIKDKDFLDNEENEDILEDIVLTLTLFEDREMIEERLKTYAHLFDDKVMKQLKRRRYTGWGRLSRKLINGIRDKQSGKTILDFLKSDGFANRNFMQLIHDDSLTFKEDIQKAQVSGQGDSLHEHIANLAGSPAIKKGILQTVKVVDELVKVMGRHKPENIVIEMARENQTTQKGQKNSRERMKRIEEGIKELGSQILKEHPVENTQLQNEKLYLYYLQNGRDMYVDQELDINRLSDYDVDHIVPQSFLKDDSIDNKVLTRSDKNRGKSDNVPSEEVVKKMKNYWRQLLNAKLITQRKFDNLTKAERGGLSELDKAGFIKRQLVETRQITKHVAQILDSRMNTKYDENDKLIREVKVITLKSKLVSDFRKDFQFYKVREINNYHHAHDAYLNAVVGTALIKKYPKLESEFVYGDYKVYDVRKMIAKSEQEIGKATAKYFFYSNIMNFFKTEITLANGEIRKRPLIETNGETGEIVWDKGRDFATVRKVLSMPQVNIVKKTEVQTGGFSKESILPKRNSDKLIARKKDWDPKKYGGFVSPTVAYSVLVVAKVEKGKSKKLKSVKELLGITIMERSSFEKNPIDFLEAKGYKEVKKDLIIKLPKYSLFELENGRKRMLASARELQKGNELALPSKYVNFLYLASHYEKLKGSPEDNEQKQLFVEQHKHYLDEIIEQISEFSKRVILADANLDKVLSAYNKHRDKPIREQAENIIHLFTLTNLGAPAAFKYFDTTIDRKEYRSTKEVLDATLIHQSITGLYETRIDLSQLGGD

SEQ ID NO: 8 - protein, 1368 aa, Streptococcus pyogenes
MDKKYSIGLAIGTNSVGWAVITDEYKVPSKKFKVLGNTDRHSIKKNLIGALLFDSGETAEATRLKRTARRRYTRRKNRICYLQEIFSNEMAKVDDSFFHRLEESFLVEEDKKHERHPIFGNIVDEVAYHEKYPTIYHLRKKLVDSTDKADLRLIYLALAHMIKFRGHFLIEGDLNPDNSDVDKLFIQLVQTYNQLFEENPINASGVDAKAILSARLSKSRRLENLIAQLPGEKKNGLFGNLIALSLGLTPNFKSNFDLAEDAKLQLSKDTYDDDLDNLLAQIGDQYADLFLAAKNLSDAILLSDILRVNTEITKAPLSASMIKRYDEHHQDLTLLKALVRQQLPEKYKEIFFDQSKNGYAGYIDGGASQEEFYKFIKPILEKMDGTEELLVKLNREDLLRKQRTFDNGSIPHQIHLGELHAILRRQEDFYPFLKDNREKIEKILTFRIPYYVGPLARGNSRFAWMTRKSEETITPWNFEEVVDKGASAQSFIERMTNFDKNLPNEKVLPKHSLLYEYFTVYNELTKVKYVTEGMRKPAFLSGEQKKAIVDLLFKTNRKVTVKQLKEDYFKKIECFDSVEISGVEDRFNASLGTYHDLLKIIKDKDFLDNEENEDILEDIVLTLTLFEDREMIEERLKTYAHLFDDKVMKQLKRRRYTGWGRLSRKLINGIRDKQSGKTILDFLKSDGFANRNFMQLIHDDSLTFKEDIQKAQVSGQGDSLHEHIANLAGSPAIKKGILQTVKVVDELVKVMGRHKPENIVIEMARENQTTQKGQKNSRERMKRIEEGIKELGSQILKEHPVENTQLQNEKLYLYYLQNGRDMYVDQELDINRLSDYDVDHIVPQSFLKDDSIDNKVLTRSDKNRGKSDNVPSEEVVKKMKNYWRQLLNAKLITQRKFDNLTKAERGGLSELDKAGFIKRQLVETRQITKHVAQILDSRMNTKYDENDKLIREVKVITLKSKLVSDFRKDFQFYKVREINNYHHAHDAYLNAVVGTALIKKYPKLESEFVYGDYKVYDVRKMIAKSEQEIGKATAKYFFYSNIMNFFKTEITLANGEIRKRPLIETNGETGEIVWDKGRDFATVRKVLSMPQVNIVKKTEVQTGGFSKESILPKRNSDKLIARKKDWDPKKYGGFVSPTVAYSVLVVAKVEKGKSKKLKSVKELLGITIMERSSFEKNPIDFLEAKGYKEVKKDLIIKLPKYSLFELENGRKRMLASARELQKGNELALPSKYVNFLYLASHYEKLKGSPEDNEQKQLFVEQHKHYLDEIIEQISEFSKRVILADANLDKVLSAYNKHRDKPIREQAENIIHLFTLTNLGAPAAFKYFDTTIDRKEYRSTKEVLDATLIHQSITGLYETRIDLSQLGGD

SEQ ID NO: 9 - protein, 1368 aa, Streptococcus pyogenes
MDKKYSIGLDIGTNSVGWAVITDEYKVPSKKFKVLGNTDRHSIKKNLIGALLFDSGETAEATRLKRTARRRYTRRKNRICYLQEIFSNEMAKVDDSFFHRLEESFLVEEDKKHERHPIFGNIVDEVAYHEKYPTIYHLRKKLVDSTDKADLRLIYLALAHMIKFRGHFLIEGDLNPDNSDVDKLFIQLVQTYNQLFEENPINASGVDAKAILSARLSKSRRLENLIAQLPGEKKNGLFGNLIALSLGLTPNFKSNFDLAEDAKLQLSKDTYDDDLDNLLAQIGDQYADLFLAAKNLSDAILLSDILRVNTEITKAPLSASMIKRYDEHHQDLTLLKALVRQQLPEKYKEIFFDQSKNGYAGYIDGGASQEEFYKFIKPILEKMDGTEELLVKLNREDLLRKQRTFDNGSIPHQIHLGELHAILRRQEDFYPFLKDNREKIEKILTFRIPYYVGPLARGNSRFAWMTRKSEETITPWNFEEVVDKGASAQSFIERMTNFDKNLPNEKVLPKHSLLYEYFTVYNELTKVKYVTEGMRKPAFLSGEQKKAIVDLLFKTNRKVTVKQLKEDYFKKIECFDSVEISGVEDRFNASLGTYHDLLKIIKDKDFLDNEENEDILEDIVLTLTLFEDREMIEERLKTYAHLFDDKVMKQLKRRRYTGWGRLSRKLINGIRDKQSGKTILDFLKSDGFANRNFMQLIHDDSLTFKEDIQKAQVSGQGDSLHEHIANLAGSPAIKKGILQTVKVVDELVKVMGRHKPENIVIEMARENQTTQKGQKNSRERMKRIEEGIKELGSQILKEHPVENTQLQNEKLYLYYLQNGRDMYVDQELDINRLSDYDVDHIVPQSFLKDDSIDNKVLTRSDKNRGKSDNVPSEEVVKKMKNYWRQLLNAKLITQRKFDNLTKAERGGLSELDKAGFIKRQLVETRQITKHVAQILDSRMNTKYDENDKLIREVKVITLKSKLVSDFRKDFQFYKVREINNYHHAHDAYLNAVVGTALIKKYPKLESEFVYGDYKVYDVRKMIAKSEQEIGKATAKYFFYSNIMNFFKTEITLANGEIRKRPLIETNGETGEIVWDKGRDFATVRKVLSMPQVNIVKKTEVQTGGFSKESILPKRNSDKLIARKKDWDPKKYGGFVSPTVAYSVLVVAKVEKGKSKKLKSVKELLGITIMERSSFEKNPIDFLEAKGYKEVKKDLIIKLPKYSLFELENGRKRMLASAGELQKGNELALPSKYVNFLYLASHYEKLKGSPEDNEQKQLFVEQHKHYLDEIIEQISEFSKRVILADANLDKVLSAYNKHRDKPIREQAENIIHLFTLTNLGAPAAFKYFDTTIDRKQYRSTKEVLDATLIHQSITGLYETRIDLSQLGGD

SEQ ID NO: 10 - skipped

SEQ ID NO: 11 - protein, 1359 aa, Streptococcus pyogenes
MDKKYSIGLDIGTNSVGWAVITDEYKVPSKKFKVLGNTDRHSIKKNLIGALLFDSGETAEATRLKRTARRRYTRRKNRICYLQEIFSNEMAKVDDSFFHRLEESFLVEEDKKHERHPIFGNIVDEVAYHEKYPTIYHLRKKLVDSTDKADLRLIYLALAHMIKFRGHFLIEGDLNPDNSDVDKLFIQLVQTYNQLFEENINASGVDAKAILSARLSKSRRLENLIAQLPGEKKNGLFGNLIALSLGLTPNFKSNFDLAEDAKLQLSKDTYDDDLDNLLAQIGDQYADLFLAAKNLSDAILLSDILRVNTEITKAPLSASMIKRYDEHHQDLTLLKALVRQQLPEKYKEIFFDQSKNGYAGYIDGGASQEEFYKFIKPILEKMDGTEELLVKLNREDLLRKQRTFDNGSIPHQIHLGELHAILRRQEDFYPFLKDNREKIEKILTFRIPYYVGPLARGNSRFAWMTRKSEETITPWNFEEVVDKGASAQSFIERMTNFDKNLPNEKVLPKHSLLYEYFTVYNELTKVKYVTEGMRKPAFLSGEQKKAIVDLLFKTNRKVTVKQLKEDYFKKIECFDSVEISGVEDRFNASLGTYHDLLKIIKDKDFLDNEENEDILEDIVLTLTLFEDREMIEERLKTYAHLFDDKVMKQLKRRRYTGWGRLSRKLINGIRDKQSGKTILDFLKDGFANRNFMQLIHDDSLTFKEDIQKAQVSGQGDSLHEHIANLAGSPAIKKGILQTVKVVDELVKVMGRHKPENIVIEMARENQTTQKGQKNSRERMKRIEEGIKELGSQILKEHPVENTQLQNEKLYLYYLQNGRDMYVDQELDINRLSDYDVDHIVPQSFLKDDSIDNKVLTRSDKNRGKSDNVPSEEVVKKMKNYWRQLLNAKLITQRKFDNLTKAERGGLSELDKAGFIKRQLVETRQITKHVAQILDSRMNTKYDENDKLIREVKVITLKSKLVSDFRKDFQFYKVREINNYHHAHDAYLNAVVGTALIKKYPKLESEFVYGDYKVYDVSEQEIGKATAKYFFYSNIMNFFKTEITLANGEIRKRPLIETNGETGEIVWDKGRDFATVRKVLSMPQVNIVKKTEVQTGGFSKESILPKRNSDKLIARKKDWDPKKYGGFDSPTVAYSVLVVAKVEKGKSKKLKSVKELLGITIMERSSFEKNPIDFLEAKGYKEVKKDLIIKLPKYSLFELENGRKRMLASGELQKGNELALPSKYVNFLYLASHYEKLKGSPEDNEQKQLFVEQHKHYLDEIIEQISEFSKRVILADANLDKVLSAYNKHRDKPIREQAENIIHLFTLTNLGAPAAFKYFDTTIDRKRYTSTKEVLDATLIHQSITGLYETRIDLSQLGGD

SEQ ID NO: 12 - protein, 1355 aa, Streptococcus gallolyticus
MTKKNYSIGLDIGTNSVGWAVITDDYKVPAKKMKVLGNTDKKYIKKNLLGALLFDSGETAEATRLKRTARRRYTRRKNRLRYLQEIFANEIAKVDESFFQRLDESFLTDDDKTFDSHPIFGNKAEEDAYHQKFPTIYHLRKHLADSSEKADLRLVYLALAHMIKFRGHFLIEGELNAENTDVQKIFADFVGVYNRTFDDSHLSEITVDVASILTEKISKSRRLENLIKYYPTEKKNTLFGNLIALALGLQPNFKTNFKLSEDAKLQFSKDTYEEDLEELLGKIGDDYADLFTSAKNLYDAILLSGILTVDDNSTKAPLSASMIKRYVEHHEDLEKLKEFIKANKSELYHDIFKDKNKNGYAGYIENGVKQDEFYKYLKNILSKIKIDGSDYFLDKIEREDFLRKQRTFDNGSIPHQIHLQEMHAILRRQGDYYPFLKEKQDRIEKILTFRIPYYVGPLVRKDSRFAWAEYRSDEKITPWNFDKVIDKEKSAEKFITRMTLNDLYLPEEKVLPKHSHVYETYAVYNELTKIKYVNEQGKESFFDSNMKQEIFDHVFKENRKVTKEKLLNYLNKEFPEYRIKDLIGLDKENKSFNASLGTYHDLKKILDKAFLDDKVNEEVIEDIIKTLTLFEDKDMIHERLQKYSDIFTANQLKKLERRHYTGWGRLSYKLINGIRNKENNKTILDYLIDDGSANRNFMQLINDDTLPFKQIIQKSQVVGDVDDIEAVVHDLPGSPAIKKGILQSVKIVDELVKVMGGNPDNIVIEMARENQTTNRGRSQSQQRLKKLQNSLKPSYIEDKVENSHLQNDQLFLYYIQNGKDMYTGDELDIDHLSDYDIDHIIPQAFIKDDSIDNRVLTSSAKNRGKSDDVPSLDIVRARKAEWVRLYKSGLISKRKFDNLTKAERGGLTEADKAGFIKRQLVETRQITKHVAQILDARFNTEHDENDKVIRDVKVITLKSNLVSQFRKDFEFYKVREINDYHHAHDAYLNAVVGTALLKKYPKLASEFVYGEYKKYDISSDKATAKYFFYSNLMNFFKTKVKYADGTVFERPIIETNADGEIAWNKQIDFEKVRKVLSYPQVNIVKKVETQTGGFSKESILPKGDSDKLIPRKTKKVYWDTKKYGGFDSPTVAYSVFVVADVEKGKAKKLKTVKELVGISIMERSFFEENPVEFLENKGYHNIREDKLIKLPKYSLFEFEGGRRRLLASASELQKGNEMVLPGYLVELLYHAHRADNFNSTEYLNYVSEHKKEFEKVLSCVEDFANLYVDVEKNLSKIRAVADSMDNFSIEEISNSFINLLTLTALGAPADFNFLGEKIPRKRYTSTKECLNATLIHQSITGLYETRIDLSKLGEE

SEQ ID NO: 13 - protein, 1359 aa, Streptococcus mitis
KKGYSIGLDIGTNSVGFAVITDDYKVPSKKMKVLGNTDKRFIKKNLIGALLFDEGTTAEARRLKRTARRRYTRRKNRLRYLQEIFSEEMSKVDSSFFHRLDDSFLIPEDKRESKYPIFATLTEEKEYHKQFPTIYHLRKQLADSKEKTDLRLIYLALAHMIKYRGHFLYEEAFDIKNNDIQKIFNEFISIYDNTFEGSSLSGQNAQVEAIFTDKISKSAKRERVLKLFPDEKSTGLFSEFLKLIVGNQADFKKHFDLEDKAPLQFSKDTYDEDLENLLGQIGDDFTDLFVSAKKLYDAILLSGILTVTDPSTKAPLSASMIERYENHQNDLAALKQFIKNNLPEKYDEVFSDQSKDGYAGYIDGKTTQETFYKYIKNLLSKFEGTDYFLDKIEREDFLRKQRTFDNGSIPHQIHLQEMNAILRRQGEYYPFLKDNKEKIEKILTFRIPYYVGPLARGNRDFAWLTRNSDEAIRPWNFEEIVDKASSAEDFINKMTNYDLYLPEEKVLPKHSLLYETFAVYNELTKVKFIAEGLRDYQFLDSGQKKQIVNQLFKENRKVTEKDIIHYLHNVDGYDGIELKGIEKQFNASLSTYHDLLKIIKDKEFMDDAKNEAILENIVHTLTIFEDREMIKQRLAQYDSLFDEKVIKALTRRHYTGWGKLSAKLINGICDKQTGNTILDYLIDDGKINRNFMQLINDDGLSFKEIIQKAQVIGKTDDVKQVVQELSGSPAIKKGILQSIKIVDELVKVMGHAPESIVIEMARENQTTARGKKNSQQRYKRIEDSLKILASNILKENPTDNNQLQNDRLFLYYLQNGKDMYTGEALDINQLSSYDIDHIIPQAFIKDDSLDNRVLTSSKDNRGKSDNVPSIEVVQKRKAFWQQLLDSKLISERKFNNLTKAERGGLDERDKVGFIKRQLVETRQITKHVAQILDARYNTEVNEKDKKNRTVKIITLKSNLVSNFRKEFRLYKVREINDYHHAHDAYLNAVVAKAILKKYPKLEPEFVYGEYQKYDLSKDPKEVEKATEKYFFYSNLLNFFKEEVHYADGTIVKRENIEYSKDTGEIAWNKEKDFAIIKKVLSLPQVNIVKKREVQTGGFSKESILPKGNSDKLIPRKTKDILLDTTKYGGFDSPVIAYSILLIADIEKGKAKKLKTVKTLVGITIMEKAAFEENPITFLENKGYHNVRKENILCLPKYSLFELENGRRRLLASAKELQKGNEIVLPVYLTTLLYHSKNVHKLDEPGHLEYIQKHRNEFKDLLNLVSEFSQKYVLADANLEKIKSLYADNEQADIEILANSFINLLTFTALGAPAAFKFFGKDIDRKRYTTVSEILNATLIHQSITGLYETWIDLSKLGED

SEQ ID NO: 14 - protein, 986 aa, Staphylococcus aureus
MKRNYILGLDIGITSVGYGIIDYETRDVIDAGVRLFKEANVENNEGRRSKRGARRLKRRRRHRIQRVKKLLFDYNLLTDHSELSGNPYEARVKGLSQKLSEEEFSAALLHLAKRRGVHNVNEVEEDTGNELSTKEQISRNSKLEEKYVAELQLERLKKDGEVRGSINRKTSDYVKEAKQLLKVQKAYHQLDQSFIDTYIDLLETRRTYYEGPGEGSPFGWKDIKEWYEMLMGHCTYFPEELRSVKYAYNADLYNALNDLNNLVITRDENEKLEYYEKFQIIENVFKQKKKPTLKQIAKEILVNEEDIKGYRVTSTGKPEFTNLKVYHDIKDITARKENAELLDQIAKILTIYQSSEDIQEELTNLNSELTQEEIEQISNLKGYTGTHNLSLKAINLILDELWTNDNQIAIFNRLKLVPKKVDLSQQKEIPTTLVDDFILSPVVKRSFIQSIKVINAIIKKYGLPNDIIIELAREKNSKDAQKMINEMQKQTNEEIIRTTGKENAKYLIEKIKLHDMQEGKCLYSLEAIPLEDLLNNPFNYEVDHIIPRSVSFDNSFNNKVLVKQEEASKKGNRTPFQYLSSSDSKISYETFKKHILNLAKGKGRISKTKKEYLLEERDQKDFINRNLVDTRYATRGLMNLLRSYFRVNNLDVKVKSINGGFTSFLRRKWKFKKERNKGYKHHAEDALIIANADFIFKEWKKLDKNQMFEEKETEQEYKEIFITPHQIKHIKDFKDYKYSHRVDKKPNREVNNLNGLYDKDNDKLKKLINKSPEKLLMYHHDPQTYQKKLIMEQYGDEKNLYKYYEETGNYLTKYSKKDNGPVIKKIKYYGNKLNAHLDITDDYPNSVKLSLKPYRFDVYLDNGVYKFVTVKNLDVIKKENYYEVNSKAYEEAKKKKISNQAEFIASFYNNDLIKINGELYRVIGVNNDLLNRIEVNMIDITYREYLENMNDKRPPRIIKTIASKTQSIKKLYEVKSKKHPQIIKKG

SEQ ID NO: 15 - protein, 1044 aa, Streptococcus pyogenes
LSASMIKRYDEHHQDLTLLKALVRQQLPEKYKEIFFDQSKNGYAGYIDGGASQEEFYKFIKPILEKMDGTEELLAKLNREDLLRKQRTFDNGSIPHQIHLGELHAILRRQEDFYPFLKDNREKIEKILTFRIPYYVGPLARGNSRFAWMTRKSEETITPWNFEEVVDKGASAQSFIERMTNFDKNLPNEKVLPKHSLLYEYFTVYNELTKVKYVTEGMRKPAFLSGEQKKAIVDLLFKTNRKVTVKQLKEDYFKKIECFDSVEISGVEDRFNASLGTYHDLLKIIKDKDFLDNEENEDILEDIVLTLTLFEDREMIEERLKTYAHLFDDKVMKQLKRRRYTGWGRLSRKLINGIRDKQSGKTILDFLKDGFANRNFMQLIHDDSLTFKEDLQKAQVSGQGDSLHEHIANLAGSPAIKKGILQTVKVVDELVKVMGRHKPENIVIEMARENQTTQKGQKNSRERMKRIEEGIKELGSDILKEYPVENTQLQNEKLYLYYLQNGRDMYVDQELDINRLSDYDVDHIVPQSFLKDDSIDNKVLTRSDKNRGKSDNVPSEEVVKKMKNYWKQLLNAKLITQRKFDNLTKAERGGLSELDKAGFIKRQLVETRQITKHVAQILDSRMNTKYDENDKLIREVRVITLKSKLVSDFRKDFQFYKVREINNYHHAHDAYLNAVVGTALIKKYPKLESEFVYGDYKVYDISEQEIGKATAKYFFYSNIMNFFKTEITLANGEIRKRPLIETNGETGEIVWDKGRDFATVRKVLSMPQVNIVKKTEVQTGGFSKESILPKRNSDKLIARKKDWDPKKYGGFDSPTVAYSVLVVAKVEKGKSKKLKSVKELVGITIMERSSFEKDPVDFLEAKGYKEVRKDLIIKLPKYSLFELENGRKRMLASGELQKGNELALPSKYVNFLYLASHYEKLKGSPEDNEQKQLFVEQHKHYLDEIIEQISEFSKRVILADANLDKVLSAYNKHRDKPIREQAENIIHLFTLTNLGAPAAFKCFDTTIGRNRYKSIKEVLDATLIHQSITGLYETRIDLSQLGGD

SEQ ID NO: 16 - protein, 1359 aa, Streptococcus pyogenes; identical to SEQ ID NO: 11

SEQ ID NO: 17 - protein, 1359 aa, Streptococcus pyogenes
MDKKYSIGLDIGTNSVGWAVITDDYKVPSKKLKGLGNTDRHGIKKNLIGALLFDSGETAEATRLKRTARRRYTRRKNRICYLQEIFSNEMAKVDDSFFHRLEESFLVEEDKKHERHPIFGNIVDEVAYHEKYPTIYHLRKKLADSTDKVDLRLIYLALAHMIKFRGHFLIEGDLNPDNSDVDKLFIQLVQTYNQLFEENINASRVDAKAILSARLSKSRRLENLIAQLPGEKKNGLFGNLIALSLGLTPNFKSNFDLAEDAKLQLSKDTYDDDLDNLLAQIGDQYADLFLAAKNLSDATLLSDILRVNSEITKAPLSASMIKRYDEHHQDLTLLKALVRQQLPEKYKEIFFDQSKNGYAGYIDGGASQEEFYKFIKPILEKMDGTEELLAKLNREDLLRKQRTFDNGSIPYQIHLGELHAILRRQEDFYPFLKDNREKIEKILTFRIPYYVGPLARGNSRFAWMTRKSEETITPWNFEEVVDKGASAQSFIERMTNFDKNLPNEKVLPKHSLLYEYFTVYNELTKVKYVTEGMRKPAFLSGEQKKAIVDLLFKTNRKVTVKQLKEDYFKKIECFDSVEISGVEDRFNASLGTYHDLLKIIKDKDFLDNEENEDILEDIVLTLTLFEDREMIEERLKTYAHLFDDKVMKQLKRRRYTGWGRLSRKLINGIRDKQSGKTILDFLKDGFANRNFMQLIHDDSLTFKEDIQKAQVSGQGDSLHEHIANLAGSPAIKKGILQTVKVVDELVKVMGRHKPENIVIEMARENQTTQKGQKNSRERMKRIEEGIKELGSDILKEYPVENTQLQNEKLYLYYLQNGRDMYVDQELDINRLSDYDVDHIVPQSFLKDDSIDNKVLTRSDKNRGKSDNVPSEEVVKKMKNYWRQLLNAKLITQRKFDNLTKAERGGLSELDKVGFIKRQLVETRQITKHVAQILDSRMNTKYDENDKLIREVRVITLKSKLVSDFRKDFQFYKVREINNYHHAHDAYLNAVVGTALIKKYPKLESEFVYGDYKVYDVSEQEIGKATAKYFFYSNIMNFFKTEITLANGEIRKRPLIETNGETGEIVWDKGRDFATVRKVLSMPQVNIVKKTEVQTGGFSKESILPKRNSDKLIARKKDWDPKKYGGFDSPTVAYSVLVVAKVEKGKSKKLKSVKELLGITIMERSSFEKDPIDFLEAKGYKEVRKDLIIKLPKYSLFELENGRKRMLASGELQKGNELALPSKYVNFLYLASHYEKLKGSPEDNEQKQLFVEQHKHYLDEIIEQISEFSKRVILADANLDKVLSAYNKHRDKPIREQAENIIHLFTLTNLGAPAAFKYFDTTIDRKRYTSTKEVLDATLIHQSITGLYETRIDLSQLGGD

SEQ ID NO: 18 - protein, 1359 aa, Streptococcus pyogenes
MDKKYSIGLDIGTNSVGWAVITDDYKVPSKKFKVLGNTDRHSIKKNLIGALLFDSGETAEATRLKRTARRRYTRRKNRICYLQEIFSNEMAKVDDSFFHRLEESFLVEEDKKHERHPIFGNIVDEVAYHEKYPTIYHLRKKLVDSTDKADLRLIYLALAHMIKFRGHFLIEGDLNPDNSDVDKLFIQLVQTYNQLFEENINASGVDAKAILSARLSKSRRLENLIAQLPGEKKNGLFGNLIALSLGLTPNFKSNFDLAEDAKLQLSKDTYDDDLDNLLAQIGDQYADLFLAAKNLSDAILLSDILRLNSEITKAPLSASMIKRYDEHHQDLTLLKALVRQQLPEKYKEIFFDQSKNGYAGYIDGGASQEEFYKFIKPILEKMDGTEELLAKLNREDLLRKQRTFDNGSIPHQIHLGELHAILRRQEDFYPFLKDNREKIEKILTFRIPYYVGPLARGNSRFAWMTRKSEETITPWNFEEVVDKGASAQSFIERMTNFDKNLPNEKVLPKHSLLYEYFTVYNELTKVKYVTEGMRKPAFLSGEQKKAIVDLLFKTNRKVTVKQLKEDYFKKIECFDSVEISGVEDRFNASLGTYHDLLKIIKDKDFLDNEENEDILEDIVLTLTLFEDREMIEERLKTYAHLFDDKVMKQLKRRRYTGWGRLSRKLINGIRDKQSGKTILDFLKDGFANRNFMQLIHDDSLTFKEDIQKAQVSGQGDSLHEHIANLAGSPAIKKGILQTVKVVDELVKVMGRHKPENIVIEMARENQTTQKGQKNSRERMKRIEEGIKELGSQILKEHPVENTQLQNEKLYLYYLQNGRDMYVDQELDINRLSDYDVDHIVPQSFIKDDSIDNKVLTRSDKNRGKSNNVPSEEVVKKMKNYWRQLLNAKLITQRKFDNLTKAERGGLSELDKAGFIKRQLVETRQITKHVAQILDSRMNTKYDENDKLIREVKVITLKSKLVSDFRKDFQFYKVREINNYHHAHDAYLNAVVGTALIKKYPKLESEFVYGDYKVYDVSEQEIGKATAKYFFYSNIMNFFKTEITLANGEIRKRPLIETNGETGEIVWDKGRDFATVRKVLSMPQVNIVKKTEVQTGGFSKESILPKRNSDKLIARKKDWDPKKYGGFDSPTVAYSVLVVAKVEKGKSKKLKSVKELLGITIMERSSFEKNPIDFLEAKGYKEVRKDLIVKLPKYSLFELENGRKRMLASGELQKGNELALPSKYVNFLYLASHYEKLKGSPEDNEQKQLFVEQHKHYLDEIIEQISEFSKRVILADANLDKVLSAYNKHRDKPIREQAENIIHLFTLTNLGAPAAFKYFDTTIDRKRYTSTKEVLDATFIHQSITGLYETRIDLSQLGGD

SEQ ID NO: 19 - protein, 1359 aa, Streptococcus pyogenes
MDKKYSIGLDIGTNSVGWAVITDDYKVPSKKFKVLGNTDRHSIKKNLIGALLFDSGETAEATRLKRTARRRYTRRKNRICYLQEIFSNEMAKVDDSFFHRLEESFLVEEDKKHERHPIFGNIVDEVAYHEKYPTIYHLRKKLVDSTDKADLRLIYLALAHMIKFRGHFLIEGDLNPDNSDVDKLFIQLVQTYNQLFEENINASGVDAKAILSARLSKSRRLENLIAQLPGEKKNGLFGNLIALSLGLTPNFKSNFDLAEDAKLQLSKDTYDDDLDNLLAQIGDQYADLFLAAKNLSDAILLSDILRVNTEITKAPLSASMIKRYDEHHQDLTLLKALVRQQLPEKYKEIFFDQSKNGYAGYIDGGASQEEFYKFIKPILEKMDGTEELLVKLNREDLLRKQRTFDNGSIPHQIHLGELHAILRRQEDFYPFLKDNREKIEKILTFRIPYYVGPLARGNSRFAWMTRKSEETITPWNFEEVVDKGASAQSFIERMTNFDKNLPNEKVLPKHSLLYEYFTVYNELTKVKYVTEGMRKPAFLSGEQKKAIVDLLFKTNRKVTVKQLKEDYFKKIECFDSVEISGVEDRFNASLGTYHDLLKIIKDKDFLDNEENEDILEDIVLTLTLFEDREMIEERLKTYAHLFDDKVMKQLKRRRYTGWGRLSRKLINGIRDKQSGKTILDFLKDGFANRNFMQLIHDDSLTFKEDIQKAQVSGQGDSLHEHIANLAGSPAIKKGILQTVKVVDELVKVMGRHKPENIVIEMARENQTTQKGQKNSRERMKRIEEGIKELGSQILKEHPVENTQLQNEKLYLYYLQNGRDMYVDQELDINRLSDYDVDHIVPQSFLKDDSIDNKVLTRSDKNRGKSDNVPSEEVVKKMKNYWRQLLNAKLITQRKFDNLTKAERGGLSELDKAGFIKRQLVETRQITKHVAQILDSRMNTKYDENDKLIREVKVITLKSKLVSDFRKDFQFYKVREINNYHHAHDAYLNAVVGTALIKKYPKLESEFVYGDYKVYDVSEQEIGKATAKYFFYSNIMNFFKTEITLANGEIRKRPLIETNGETGEIVWDKGRDFATVRKVLSMPQVNIVKKTEVQTGGFSKESILPKRNSDKLIARKKDWDPKKYGGFDSPTVAYSVLVVAKVEKGKSKKLKSVKELLGITIMERSSFEKNPIDFLEAKGYKEVKKDLIIKLPKYSLFELENGRKRMLASGELQKGNELALPSKYVNFLYLASHYEKLKGSPEDNEQKQLFVEQHKHYLDEIIEQISEFSKRVILADANLDKVLSAYNKHRDKPIREQAENIIHLFTLTNLGAPAAFKYFDTTIDRKRYTSTKEVLDATLIHQSITGLYETRIDLSQLGGD

SEQ ID NO: 20 - protein, 1359 aa, Streptococcus pyogenes
MDKKYSIGLDIGTNSVGWAVITDDYKVPSKKFKVLGNTDRHSIKKNLIGALLFDSGEIAEATRLKRTARRRYTRRKNRICYLQEIFSNEMAKVDDSFFHRLEESFLVEEDKKHERHPIFGNIVDEVAYHEKYPTIYHLRKKLVDSTDKADLRLIYLALAHMIKFRGHFLIEGDLNPDNSDVDKLFIQLVQTYNQLFEENINASGVDAKAILSARLSKSRRLENLIAQLPGEKKNGLFGNLIALSLGLTPNFKSNFDLAEDAKLQLSKDTYDDDLDNLLAQIGDQYADLFLAAKNLSDAILLSDILRLNSEITKAPLSASMIKRYDEHHQDLTLLKALVRQQLPEKYKEIFFDQSKNGYAGYIDGGASQEEFYKFIKPILEKMDGTEELLAKLNREDLLRKQRTFDNGSIPHQIHLGELHAILRRQEDFYPFLKDNREKIEKILTFRIPYYVGPLARGNSRFAWMTRKSEETITPWNFEEVVDKGASAQSFIERMTNFDKNLPNEKVLPKHSLLYEYFTVYNELTKVKYVTEGMRKPAFLSGEQKKAIVDLLFKTNRKVTVKQLKEDYFKKIECFDSVEISGVEDRFNASLGTYHDLLKIIKDKDFLDNEENEDILEDIVLTLTLFEDREMIEERLKTYAHLFDDKVMKQLKRRRYTVWGRLSRKLINGIRDKQSGKTILDFLKDGFANRNFMQLIHDDSLTFKEDIQKAQVSGQGDSLHEHIANLAGSPAIKKGILQTVKVVDELVKVMGRHKPENIVIEMARENQTTQKGQKNSRERMKRIEEGIKELGSQILKEHPVENTQLQNEKLYLYYLQNGRDMYVDQELDINRLSDYDVDHIVPQSFIKDDSIDNKVLTRSDKNRGKSDNVPSEEVVKKMKNYWRQLLNAKLITQRKFDNLTKAERGGLSELDKAGFIKRQLVETRQITKHVAQILDSRMNTKYDENDKLIREVKVITLKSKLVSDFRKDFQFYKVREINNYHHAHDAYLNAVVGTALIKKYPKLESEFVYGDYKVYDVSEQEIGKATAKYFFYSNIMNFFKTEITLANGEIRKRPLIETNGETGEIVWDKGRDFATVRKVLSMPQVNIVKKTEVQTGGFSKESILPKRNSDKLIARKKDWDPKKYGGFDSPTVAYSVLVVAKVEKGKSKKLKSVKELLGITIMERSSFEKNPIDFLEAKGYKEVRKDLIIKLPKYSLFELENGRKRMLASGELQKGNELALPSKYVNFLYLASHYEKLKGSPEDNEQKQLFVEQHKHYLDEIIEQISEFSKRVILADANLDKVLSAYNKHRDKPIREQAENIIHLFTLTNLGAPTAFKYFDTTIDRKRYTSTKEVLDATFIHQSITGLYETRIDLSQLGGD

SEQ ID NO: 21 - protein, 1359 aa, Streptococcus pyogenes
MDKKYSIGLDIGTNSVGWAVITDDYKVPSKKFKVLGNTDRHSIKKNLIGALLFDSGETAEATRLKRTARRRYTRRKNRICYLQEIFSNEIAKVDDSFFHRLEESFLVEEDKKHERHPIFGNIVDEVAYHEKYPTIYHLRKKLADSTDKADLRLIYLALAHMIKFRGHFLIEGDLNPDNSDVDKLFIQLVQTYNQLFEENINASRVDAKAILSARLSKSRRLENLIAQLPGEKRNGLFGNLIALSLGLTPNFKSNFDLAEDAKLQLSKDTYDDDLDNLLAQIGDQYADLFLAAKNLSDAILLSDILRVNTEITKAPLSASMIKRYDEHHQDLTLLKALVRQQLPEKYKEIFFDQSKNGYAGYIDGGASQEEFYKFIKPILEKMDGTEELLAKLNREDLLRKQRTFDNGSIPHQIHLGELHAILRRQEDFYPFLKDNREKIEKILTFRIPYYVGPLARGNSRFAWMTRKSEETITPWNFEEVVDKGASAQSFIERMTNFDKNLPNEKVLPKHSLLYEYFTVYNELTKVKYVTEGMRKPAFLSGEQKKAIVDLLFKTNRKVTVKQLKEDYFKKIECFDSVEISGVEDRFNASLGTYHDLLKIIKDKDFLDNEENEDILEDIVLTLTLFEDREMIEERLKTYAHLFDDKVMKQLKRRRYTGWGRLSRKLINGIRDKQSGKTILDFLKDGFANRNFMQLIHDDSLTFKEDLQKAQVSGQGDSLHEHIANLAGSPAIKKGILQTVKVVDELVKVMGRHKPENIVIEMARENQTTQKGQKNSRERMKRIEEGIKELGSDILKEYPVETTQLQNEKLYLYYLQNGRDMYVDQELDINRLSDYDVDHIVPQSFLKDDSIDNKVLTRSDKNRGKSDNVPSEEVVKKMKNYWKQLLNAKLITQRKFDNLTKAERGGLSELDKAGFIKRQLVETRQITKHVAQILDSRMNTKYDENDKLIREVRVITLKSKLVSDFRKDFQFYKVREINNYHHAHDAYLNAVVGTALIKKYPKLESEFVYGDYKVYDISEQEIGKATAKYFFYSNIMNFFKTEITLANGEIRKRPLIETNGETGEIVWDKGRDFATVRKVLSMPQVNIVKKTEVQTGGFSKESILPKRNSDKLIARKKDWDPKKYGGFDSPTVAYSVLVVAKVEKGKSKKLKSVKELVGITIMERSSFEKDPVDFLEAKGYKEVRKDLIIKLPKYSLFELENGRKRMLASGELQKGNELALPSKYVNFLYLASHYEKLKGSPEDNEQKQLFVEQHKHYLDEIIEQISEFSKRVILADANLDKVLSAYNKHRDKPIREQAENIIHLFTLTNLGAPAAFKCFDTTIGRNRYKSIKEVLDATLIHQSITGLYETRIDLSQLGGD

SEQ ID NO: 22 - protein, 1358 aa, Streptococcus pyogenes
MDKKYSIGLDIGTNSVGWAVITDDYKVPSKKFKVLGNTDRHSIKKNLIGALLFGSGETAEATRLKRTARRRYTRRKNRICYLQEIFSNEMAKVDDSFFHRLEESFLVEEDKKHERHPIFGNIVDEVAYHEKYPTIYHLRKKLADSTDKADLRLIYLALAHMIKFRGHFLIEGDLNPDNSDVDKLFIQLVQIYNQLFEENINASRVDAKAILSARLSKSRRLENLIAQLPGEKRNGLFGNLIALSLGLTPNFKSNFDLAEDAKLQLSKDTYDDDLDNLLAQIGDQYADLFLAAKNLSDAILLSDILRVNSEITKAPLSASMIKRYDEHHQDLTLLKALVRQQLPEKYKEIFFDQSKNGYAGYIDGGASQEEFYKFIKPILEKMDGTEELLVKLNREDLLRKQRTFDNGSIPHQIHLGELHAILRRQEDFYPFLKDNREKIEKILTFRIPYYVGPLARGNSRFAWMTRKSEETITPWNFEEVVDKGASAQSFIERMTNFDKNLPNEKVLPKHSLLYEYFTVYNELTKVKYVTEGMRKPAFLSGEQKKAIVDLLFKTNRKVTVKQLKEDYFKKIECFDSVEISGVEDRFNASLGAYHDLLKIIKDKDFLDNEENEDILEDIVLTLTLFEDRGMIEERLKTYAHLFDDKVMKQLKRRRYTGWGRLSRKLINGIRDKQSGKTILDFLKDGFANRNFMQLIHDDSLTFKEDIQKAQVSGQGHSLHEQIANLAGSPAIKKGILQTVKIVDELVKVMGHKPENIVIEMARENQTTQKGQKNSRERMKRIEEGIKELGSQILKEHPVENTQLQNEKLYLYYLQNGRDMYVDQELDINRLSDYDVDHIVPQSFIKDDSIDNKVLTRSDKNRGKSDNVPSEEVVKKMKNYWRQLLNAKLITQRKFDNLTKAERGGLSELDKAGFIKRQLVETRQITKHVAQILDSRMNTKYDENDKLIREVKVITLKSKLVSDFRKDFQFYKVREINNYHHAHDAYLNAVVGTALIKKYPKLESEFVYGDYKVYDVSEQEIGKATAKYFFYSNIMNFFKTEITLANGEIRKRPLIETNGETGEIVWDKGRDFATVRKVLSMPQVNIVKKTEVQTGGFSKESILPKRNSDKLIARKKDWDPKKYGGFDSPTVAYSVLVVAKVEKGKSKKLKSVKELLGITIMERSSFEKNPIDFLEAKGYKEVKKDLIIKLPKYSLFELENGRKRMLASGELQKGNELALPSKYVNFLYLASHYEKLKGSPEDNEQKQLFVEQHKHYLDEIIEQISEFSKRVILADANLDKVLSAYNKHRDKPIREQAENIIHLFTLTNLGAPAAFKYFDTTIDRKRYTSTKEVLDATLIHQSITGLYETRIDLSQLGGD

SEQ ID NO: 23 - protein, 1359 aa, Streptococcus pyogenes
MDKKYSIGLDIGTNSVGWAVITDDYKVPSKKFKVLGNTDRHSIKKNLIGALLFDSGETAEATRLKRTARRRYTRRKNRICYLQEIFSNEMAKVDDSFFHRLEESFLVEEDKKHERHPIFGNIVDEVAYHEKYPTIYHLRKKLVDSTDKADLRLIYLALAHMIKFRGHFLIEGDLNPDNSDVDKLFIQLVQTYNQLFEENINASGVDAKAILSARLSKSRRLENLIAQLPGEKKNGLFGNLIALSLGLTPNFKSNFDLAEDAKLQLSKDTYDDDLDNLLAQIGDQYADLFLAAKNLSDAILLSDILRLNSEITKAPLSASMIKRYDEHHQDLTLLKALVRQQLPEKYKEIFFDQSKNGYAGYIDGGASQEEFYKFIKPILEKMDGTEELLAKLNREDLLRKQRTFDNGSIPHQIHLGELHAILRRQEDFYPFLKDNREKIEKILTFRIPYYVGPLARGNSRFAWMTRKSEETITPWNFEEVVDKGASAQSFIERMTNFDKNLPNEKVLPKHSLLYEYFTVYNELTKVKYVTEGMRKPAFLSGEQKKAIVDLLFKTNRKVTVKQLKEDYFKKIECFDSVEISGVEDRFNASLGTYHDLLKIIKDKDFLDNEENEDILEDIVLTLTLFEDREMIEERLKTYAHLFDDKVMKQLKRRRYTGWGRLSRKLINGIRDKQSGKTILDFLKDGFANRNFMQLIHDDSLTFKEDIQKAQVSGQGDSLHEHIANLAGSPAIKKGILQTVKVVDELVKVMGRHKPENIVIEMARENQTTQKGQKNSRERMKRIEEGIKELGSQILKEHPVENTQLQNEKLYLYYLQNGRDMYVDQELDINRLSDYDVDHIVPQSFIKDDSIDNKVLTRSDKNRGKSDNVPSEEVVKKMKNYWRQLLNAKLITQRKFDNLTKAERGGLSELDKAGFIKRQLVETRQITKHVAQILDSRMNTKYDENDKLIREVKVITLKSKLVSDFRKDFQFYKVREINNYHHAHDAYLNAVVGTALIKKYPKLESEFVYGDYKVYDVSEQEIGKATAKYFFYSNIMNFFKTEITLANGEIRKRPLIETNGETGEIVWDKGRDFATVRKVLSMPQVNIVKKTEVQTGGFSKESILPKRNSDKLIARKKDWDPKKYGGFDSPTVAYSVLVVAKVEKGKSKKLKSVKELLGLTIMERSSFEKNPIDFLEAKGYKEVKKDLIIKLPKYSLFELENGRKRMLASGELQKGNELALPSKYVNFLYLASHYEKLKGSPEDNEQKQLFVEQHKHYLDEIIEQISEFSKRVILADANLDKVLSAYNKHRDKPIREQAENIIHLFTLTNLGAPAAFKYFDTTIDRKRYTSTKEVLDATLIHQSITGLYETRIDLSQLGGD

SEQ ID NO: 24 - protein, 1358 aa, Streptococcus pyogenes
MDKKYSIGLDIGTNSVGWAVITDDYKVPSKKLKVLGNTDRHGIKKNLIGALLFDSGETAEATRLKRTARRRYTRRKNRICYLQEIFSNEMAKVDDSFFHRLEESFLVEEDKKHERHPIFGNIVDEVAYHEKYPTIYHLRKKLADSTDKVDLRLIYLALAHMIKFRGHFLIEGDLNPDNSDVDKLFIQLVQTYNQLFEENINASRVDAKAILSARLSKSRRLENLIAQLPGEKKNGLFGNLIALSLGLTPNFKSNFDLAEDAKLQLSKDTYDDDLDNLLAQIGDQYADLFLAAKNLSDAILLSDILRVNSEITKAPLSASMIKRYDEHHQDLTLLKALVRQQLPEKYKEIFFDQSKNGYAGYIDGGASQEEFYKFIKPILEKMDGTEELLAKLNREDLLRKQRTFDNGSIPYQIHLGELHAILRRQEDFYPFLKDNREKIEKILTFRIPYYVGPLARGNSRFAWMTRKSEETITPWNFEEVVDKGASAQSFIERMTNFDKNLPNEKVLPKHSLLYEYFTVYNELTKVKYVTEGMRKPAFLSGEQKKAIVDLLFKTNRKVTVKQLKEDYFKKIECFDSVEISGVEDRFNTSLGTYHDLLKIIKDKDFLDNEENEDILEDIVLTLTLFEDKEMIEERLKKYANLFDDKVMKQLKRRHYTGWGRLSRKLINGIRDKQSGKTILDFLKDGFANRNFMQLINDDSLTFKEAIQKAQVSGQGHSLHEQIANLAGSPAIKKGILQTVKIVDELVKVMGHKPENIVIEMARENQTTQKGQKNSRERMKRIEEGIKELGSQILKEHPVENTQLQNEKLYLYYLQNGRDMYVDQELDINRLSDYDVDHIVPQSFLKDDSIDNKVLTRSDKNRGKSDNVPSEEVVKKMKNYWRQLLNAKLITQRKFDNLTKAERGGLSELDKAGFIKRQLVETRQITKHVAQILDSRMNTKYDENDKLIREVKVITLKSKLVSDFRKDFQFYKVREINNYHHAHDAYLNAVVGTALIKKYPKLESEFVYGDYKVYDVSEQEIGKATAKYFFYSNIMNFFKTEITLANGEIRKRPLIETNGETGEIVWDKGRDFATVRKVLSMPQVNIVKKTEVQTGGFSKESILPKRNSDKLIARKKDWDPKKYGGFDSPTVAYSVLVVAKVEKGKSKKLKSVKELLGITIMERSSFEKNPIDFLEAKGYKEVRKDLIIKLPKYSLFELENGRKRMLASGELQKGNELALPSKYVNFLYLASHYEKLKGSPEDNEQKQLFVEQHKHYLDEIIEQISEFSKRVILADANLDKVLSAYNKHRDKPIREQAKNIIHLFTLTNLGAPAAFKYFDTTIERNRYKSIKEVLDATLIHQSITGLYETRIDLSQLGGD

SEQ ID NO: 25 - protein, 1358 aa, Streptococcus pyogenes
MDKKYSIGLDIGTNSVGWAVITDDYKVPSKKLKVLGNTDRHGIKKNLIGALLFDSGETAEATRLKRTARRRYTRRKNRICYLQEIFSNEMAKVDDSFFHRLEESFLVEEDKKHERHPIFGNIVDEVAYHEKYPTIYHLRKKLADSTDKVDLRLIYLALAHMIKFRGHFLIEGDLNPDNSDVDKLFIQLVQTYNQLFEENINASRVDAKAILSARLSKSRRLENLIAQLPGEKKNGLFGNLIALSLGLTPNFKSNFDLAEDAKLQLSKDTYDDDLDNLLAQIGDQYADLFLAAKNLSDAILLSDILRVNSEITKAPLSASMIKRYDEHHQDLTLLKALVRQQLPEKYKEIFFDQSKNGYAGYIDGGASQEEFYKFIKPILEKMDGTEELLAKLNREDLLRKQRTFDNGSIPYQIHLGELHAILRRQEDFYPFLKDNREKIEKILTFRIPYYVGPLARGNSRFAWMTRKSEETITPWNFEEVVDKGASAQSFIERMTNFDKNLPNEKVLPKHSLLYEYFTVYNELTKVKYVTEGMRKPAFLSGEQKKAIVDLLFKTNRKVTVKQLKEDYFKKIECFDSVEISGVEDRFNTSLGTYHDLLKIIKDKDFLDNEENEDILEDIVLTLTLFEDKEMIEERLKKYANLFDDKVMKQLKRRHYTGWGRLSRKLINGIRDKQSGKTILDFLKDGFANRNFMQLINDDSLTFKEAIQKAQVSGQGHSLHEQIANLAGSPAIKKGILQTVKIVDELVKVMGHKPENIVIEMARENQTTQKGQKNSRERMKRIEEGIKELGSQILKEHPVENTQLQNEKLYLYYLQNGRDMYVDQELDINRLSDYDVDHIVPQSFLKDDSIDNKVLTRSDKNRGKSDNVPSEEVVKKMKNYWRQLLNAKLITQRKFDNLTKAERGGLSELDKAGFIKRQLVETRQITKHVAQILDSRMNTKYDENDKLIREVKVITLKSKLVSDFRKDFQFYKVREINNYHHAHDAYLNAVVGTALIKKYPKLESEFVYGDYKVYDVSEQEIGKATAKYFFYSNIMNFFKTEITLANGEIRKRPLIETNGETGEIVWDKGRDFATVRKVLSMPQVNIVKKTEVQTGGFSKESILPKRNSDKLIARKKDWDPKKYGGFDSPTVAYSVLVVAKVEKGKSKKLKSVKELLGITIMERSSFEKNPIDFLEAKGYKEVRKDLIIKLPKYSLFELENGRKRMLASGELQKGNELALPSKYVNFLYLASHYEKLKGSPEDNEQKQLFVEQHKHYLDEIIEQISEFSKRVILADANLDKVLSAYNKHRDKPIREQAKNIIHLFTLTNLGAPAAFKYFDTTIERNRYKSIKEVLDATLIHQSITGLYEIRIDLSQLGGD

SEQ ID NO: 26 - protein, 1359 aa, Streptococcus pyogenes
MDKKYSIGLDIGTNSVGWAVITDDYKVPSKKFKVLGNTDRHSIKKNLIGALLFDSGETAEATRLKRTARRRYTRRKNRICYLQEIFSNEMAKVDDSFFHRLEESFLVEEDKKHERHPIFGNIVDEVAYHEKYPTIYHLRKKLVDSTDKADLRLIYLALAHMIKFRGHFLIEGDLNPDNSDVDKLFIQLVQTYNQLFEENINASGVDAKAILSARLSKSRRLENLIAQLPGEKKNGLFGNLIALSLGLTPNFKSNFDLAEDAKLQLSKDTYDDDLDNLLAQIGDQYADLFLAAKNLSDAILLSDILRVNTEITKASLSASMIKRYDEHHQDLTLLKALVRQQLPEKYKEIFFDQSKNGYAGYIDGGASQEEFYKFIKPILEKMDGTEELLVKLNREDLLRKQRTFDNGSIPHQIHLGELHAILRRQEDFYPFLKDNREKIEKILTFRIPYYVGPLARGNSRFAWMTRKSEETITPWNFEEVVDKGASAQSFIERMTNFDKNLPNEKVLPKHSLLYEYFTVYNELTKVKYVTEGMRKPAFLSGEQKKAIVDLLFKTNRKVTVKQLKEDYFKKIECFDSVEISGVEDRFNASLGTYHDLLKIIKDKDFLDNEENEDILEDIVLTLTLFEDREMIEERLKTYAHLFDDKVMKQLKRRRYTGWGRLSRKLINGIRDKQSGKTILDFLKDGFANRNFMQLIHDDSLTFKEDLQKAQVSGQGDSLHEHIANLAGSPAIKKGILQTVKVVDELVKVMGRHKPENIVIEMARENQTTQKGQKNSRERMKRIEEGIKELGSDILKEYPVENTQLQNEKLYLYYLQNGRDMYVDQELDINRLSDYDVDHIVPQSFIKDDSIDNKVLTRSDKNRGKSDNVPSEEVVKKMKNYWRQLLNAKLITQRKFDNLTKAERGGLSELDKAGFIKRQLVETRQITKHVAQILDSRMNTKYDENDKLIREVKVITLKSKLVSDFRKDFQFYKVREINNYHHAHDAYLNAVVGTALIKKYPKLESEFVYGDYKVYDVSEQEIGKATAKYFFYSNIMNFFKTEITLANGEIRKRPLIETNGETGEIVWDKGRDFATVRKVLSMPQVNIVKKTEVQTGGFSKESILPKRNSDKLIARKKDWDPKKYGGFDSPTVAYSVLVVAKVEKGKSKKLKSVKELLGITIMERSSFEKNPIDFLEAKGYKEVRKDLIIKLPKYSLFELENGRKRMLASGELQKGNELALPSKYVNFLYLASHYEKLKGSPEDNEQKQLFVEQHKHYLDEIIEQISEFSKRVILADANLDKVLSAYNKHRDKPIREQAENIIHLFTLTNLGAPAAFKYFDTTIGRNRYKSIKEVLDATLIHQSITGLYETRIDLSQLGGD

SEQ ID NO: 27 - protein, 1359 aa, Streptococcus pyogenes
MDKKYSIGLDIGTNSVGWAVITDDYKVPSKKFKVLGNTDRHGIKKNLIGALLFDSGETAEATRLKRTARRRYTRRKNRICYLQEIFSNEMAKVDDSFFHRLEESFLVEEDKKHERHPIFGNIVDEVAYHEKYPTIYHLRKKLADSTDKVDLRLIYLALAHMIKFRGHFLIEGDLNPDNSDVDKLFIQLVQTYNQLFEENINASRVDAKAILSARLSKSRRLENLIAQLPGEKKNGLFGNLIALSLGLTPNFKSNFDLAEDAKLQLSKDTYDDDLDNLLAQIGDQYADLFLAAKNLSDATLLSDILRVNSEITKAPLSASMIKRYDEHHQDLTLLKALVRQQLPEKYKEIFFDQSKNGYAGYIDGGASQEEFYKFIKPILEKMDGTEELLAKLNREDLLRKQRTFDNGSIPYQIHLGELHAILRRQEDFYPFLKDNREKIEKILTFRIPYYVGPLARGNSRFAWMTRKSEETITPWNFEEVVDKGASAQSFIERMTNFDKNLPNEKVLPKHSLLYEYFTVYNELTKVKYVTEGMRKPAFLSGEQKKAIVDLLFKTNRKVTVKQLKEDYFKKIECFDSVEISGVEDRFNASLGTYHDLLKIIKDKDFLDNEENEDILEDIVLTLTLFEDREMIEERLKTYAHLFDDKVMKQLKRRRYTGWGRLSRKLINGIRDKQSGKTILDFLKDGFANRNFMQLIHDDSLTFKEDIQKAQVSGQGDSLHEHIANLAGSPAIKKGILQTVKVVDELVKVMGRHKPENIVIEMARENQTTQKGQKNSRERMKRIEEGIKELGSDILKEYPVENTQLQNEKLYLYYLQNGRDMYVDQELDINRLSDYDVDHIVPQSFLKDDSIDNKVLTRSDKNRGKSDNVPSEEVVKKMKNYWRQLLNAKLITQRKFDNLTKAERGGLSELDKAGFIKRQLVETRQITKHVAQILDSRMNTKYDENDKLIREVKVITLKSKLVSDFRKDFQFYKVREINNYHHAHDAYLNAVVGTALIKKYPKLESEFVYGDYKVYDVSEQEIGKATAKYFFYSNIMNFFKTEITLANGEIRKRPLIETNGETGEIVWDKGRDFATVRKVLSMPQVNIVKKTEVQTGGFSKESILPKRNSDKLIARKKDWDPKKYGGFDSPTVAYSVLVVAKVEKGKSKKLKSVKELLGITIMERSSFEKNPIDFLEAKGYKEVRKDLIIKLPKYSLFELENGRKRMLASGELQKGNELALPSKYVNFLYLASHYEKLKGSPEDNEQKQLFVEQHKHYLDEIIEQISEFSKRVILADANLDKVLSAYNKHRDKPIREQAENIIHLFTLTNLGAPAAFKYFDTTIDRKRYTSTKEVLDATLIHQSITGLYETRIDLSQLGGD

SEQ ID NO: 28 - protein, 1359 aa, Streptococcus pyogenes
MDKKYSIGLDIGTNSVGWAVITDDYKVPSKKFKVLGNTDRHSIKKNLIGALLFDSGETAEATRLKRTARRRYTRRKNRICYLQEIFSNEMAKVDDSFFHRLEESFLVEEDKKHERHPIFGNIVDEVAYHEKYPTIYHLRKKLADSTDKADLRLIYLALAHMIKFRGHFLIEGDLNPDNSDVDKLFIQLVQTYNQLFEENINASRVDAKAILSARLSKSRRLENLIAQLPGEKRNGLFGNLIALSLGLTPNFKSNFDLAEDAKLQLSKDTYDDDLDNLLAQIGDQYADLFLAAKNLSDAILLSDILRVNSEITKAPLSASMIKRYDEHHQDLTLLKALVRQQLPEKYKEIFFDQSKNGYAGYIDGGASQEEFYKFIKPILEKMDGTEELLAKLNREDLLRKQRTFDNGSIPHQIHLGELHAILRRQEDFYPFLKDNREKIEKILTFRIPYYVGPLARGNSRFAWMTRKSEETITPWNFEEVVDKGASAQSFIERMTNFDKNLPNEKVLPKHSLLYEYFTVYNELTKVKYVTEGMRKPEFLSGEQKKAIVDLLFKTNRKVTVKQLKEDYFKKIECFDSVEISGVEDRFNASLGTYHDLLKIIKDKDFLDNEENEDILEDIVLTLTLFEDREMIEERLKTYAHLFDDKVMKQLKRRRYTGWGRLSRKLINGIRDKQSGKTILDFLKDGFANRNFMQLIHDDSLTFKEDIQKAQVSGQGDSLHEHIANLAGSPAIKKGILQTVKVVDELVKVMGRHKPENIVIEMARENQTTQKGQKNSRERMKRIEEGIKELGSDILKEYPVENTQLQNEKLYLYYLQNGRDMYVDQELDINRLSDYDVDHIVPQSFIKDDSIDNKVLTRSDKNRGKSDNVPSEEVVKKMKNYWKQLLNAKLITQRKFDNLTKAERGGLSELDKAGFIKRQLVETRQITKHVAQILDSRMNTKYDENDKLIREVKVITLKSKLVSDFRKDFQFYKVREINNYHHAHDAYLNAVVGTALIKKYPKLESEFVYGDYKVYDVSEQEIGKATAKYFFYSNIMNFFKTEITLANGEIRKRPLIETNGETGEIVWDKGRDFATVRKVLSMPQVNIVKKTEVQTGGFSKESILPKRNSDKLIARKKDWDPKKYGGFDSPTVAYSVLVVAKVEKGKSKKLKSVKELLGITIMERSSFEKNPIDFLEAKGYKEVRKDLIIKLPKYSLFELENGRKRMLASGELQKGNELALPSKYVNFLYLASHYEKLKGSPEDNEQKQLFVEQHKHYLDEIIEQISEFSKRVILADANLDKVLSAYNKHRDKPIREQAENIIHLFTLTNFGAPAAFIYFDTTIGRNRYKSIKEVLDATLIHQSITGLYETRIDLSQLGGD

SEQ ID NO: 29 - protein, 1359 aa, Streptococcus pyogenes
MDKKYSIGLDIGTNSVGWAVITDDYKVPSKKFKVLGNTDRHSIKKNLIGALLFDSGETAEATRLKRTARRRYTRRKNRICYLQEIFSNEIAKVDDSFFHRLEESFLVEEDKKHERHPIFGNIVDEVAYHEKYPTIYHLRKKLADSTDKADLRLIYLALAHMIKFRGHFLIEGDLNPDNSDVDKLFIQLVQTYNQLFEENINASRVDAKAILSARLSKSRRLENLIAQLPGEKRNGLFGNLIALSLGLTPNFKSNFDLAEDAKLQLSKDTYDDDLDNLLAQIGDQYADLFLAAKNLSDAILLSDILRVNTEITKAPLSASMIKRYDEHHQDLTLLKALVRQQLPEKYKEIFFDQSKNGYAGYIDGGASQEEFYKFIKPILEKMDGTEELLAKLNREDLLRKQRTFDNGSIPHQIHLGELHAILRRQEDFYPFLKDNREKIEKILTFRIPYYVGPLARGNSRFAWMTRKSEETITPWNFEEVVDKGASAQSFIERMTNFDKNLPNEKVLPKHSLLYEYFTVYNELTKVKYVTEGMRKPAFLSGEQKKAIVDLLFKTNRKVTVKQLKEDYFKKIECFDSVEISGVEDRFNASLGTYHDLLKIIKDKDFLDNEENEDILEDIVLTLTLFEDREMIEERLKTYAHLFDDKVMKQLKRRRYTGWGRLSRKLINGIRDKQSGKTILDFLKDGFANRNFMQLIHDDSLTFKEDLQKAQVSGQGDSLHEHIANLAGSPAIKKGILQTVKVVDELVKVMGRHKPENIVIEMARENQTTQKGQKNSRERMKRIEEGIKELGSDILKEYPVENTQLQNEKLYLYYLQNGRDMYVDQELDINRLSDYDVDHIVPQSFLKDDSIDNKVLTRSDKNRGKSDNVPSEEVVKKMKNYWKQLLNAKLITQRKFDNLTKAERGGLSELDKAGFIKRQLVETRQITKHVAQILDSRMNTKYDENDKLIREVRVITLKSKLVSDFRKDFQFYKVREINNYHHAHDAYLNAVVGTALIKKYPKLESEFVYGDYKVYDISEQEIGKATAKYFFYSNIMNFFKTEITLANGEIRKRPLIETNGETGEIVWDKGRDFATVRKVLSMPQVNIVKKTEVQTGGFSKESILPKRNSDKLIARKKDWDPKKYGGFDSPTVAYSVLVVAKVEKGKSKKLKSVKELVGITIMERSSFEKDPVDFLEAKGYKEVRKDLIIKLPKYSLFELENGRKRMLASGELQKGNELALPSKYVNFLYLASHYEKLKGSPEDNEQKQLFVEQHKHYLDEIIEQISEFSKRVILADANLDKVLSAYNKHRDKPIREQAENIIHLFTLTNLGAPAAFKYFDTTIGRNRYKSIKEVLDATLIHQSITGLYETRIDLSQLGGD

SEQ ID NO: 30 - protein, 1359 aa, Streptococcus pyogenes
MDKKYSIGLDIGTNSVGWAVITDDYKVPSKKFKVLGNTDRHSIKKNLIGALLFDSGETAEATRLKRTARRRYTRRKNRICYLQEIFSNEIAKVDDSFFHRLEESFLVEEDKKHERHPIFGNIVDEVAYHEKYPTIYHLRKKLADSTDKADLRLIYLALAHMIKFRGHFLIEGGLNPDNSDVDKLFIQLVQTYNQLFEENINASRVDAKAILSARLSKSRRLENLIAQLPGEKRNGLFGNLIALSLGLTPNFKSNFDLAEDAKLQLSKDTYDDDLDNLLAQIGDQYADLFLAAKNLSDAILLSDILRVNTEITKAPLSASMIKRYDEHHQDLTLLKALVRQQLPEKYKEIFFDQSKNGYAGYIDGGASQEEFYKFIKPILEKMDGTEELLAKLNREDLLRKQRTFDNGSIPHQIHLGELHAILRRQEDFYPFLKDNREKIEKILTFRIPYYVGPLARGNSRFAWMTRKSEETITPWNFEEVVDKGASAQSFIERMTNFDKNLPNEKVLPKHSLLYEYFTVYNELTKVKYVTEGMRKPAFLSGEQKKAIVDLLFKTNRKVTVKQLKEDYFKKIECFDSVEISGVEDRFNASLGTYHDLLKIIKDKDFLDNEENEDILEDIVLTLTLFEDREMIEERLKTYAHLFDDKVMKQLKRRRYTGWGRLSRKLINGIRDKQSGKTILDFLKDGFANRNFMQLIHDDSLTFKEDLQKAQVSGQGDSLHEHIANLAGSPAIKKGILQTVKVVDELVKVMGRHKPENIVIEMARENQTTQKGQKNSRERMKRIEEGIKELGSDILKEYPVENTQLQNEKLYLYYLQNGRDMYVDQELDINRLSDYDVDHIVPQSFLKDDSIDNKVLTRSDKNRGKSDNVPSEEVVKKMKNYWKQLLNAKLITQRKFDNLTKAERGGLSELDKAGFIKRQLVETRQITKHVAQILDSRMNTKYDENDKLIREVRVITLKSKLVSDFRKDFQFYKVREINNYHHAHDAYLNAVVGTALIKKYPKLESEFVYGDYKVYDISEQEIGKATAKYFFYSNIMNFFKTEITLANGEIRKRPLIETNGETGEIVWDKGRDFATVRKVLSMPQVNIVKKTEVQTGGFSKESILPKRNSDKLIARKKDWDPKKYGGFDSPTVAYSVLVVAKVEKGKSKKLKSVKELVGITIMERSSFEKDPVDFLEAKGYKEVRKDLIIKLPKYSLFELENGRKRMLASGELQKGNELALPSKYVNFLYLASHYEKLKGSPEDNEQKQLFVEQHKHYLDEIIEQISEFSKRVILADANLDKVLSAYNKHRDKPIREQAENIIHLFTLTNLGAPAAFKYFDTTIGRNRYKSIKEVLDATLIHQSITGLYETRIDLSQLGGD

SEQ ID NO: 31 - protein, 1359 aa, Streptococcus pyogenes
MDKKYSIGLDIGTNSVGWAVITDDYKVPSKKFKVLGNTDRHSIKKNLIGALLFDSGETAEATRLKRTARRRYTRRKNRICYLQEIFSNEMAKVDDSFFHRLEESFLVEEDKKHERHPIFGNIVDEVAYHEKYPTIYHLRKKLVDSTDKADLRLIYLALAHMIKFRGHFLIEGDLNPDNSDVDKLFIQLVQTYNQLFEENINANGVDAKAILSARLSKSRRLENLIAQLPGEKKNGLFGNLIALSLGLTPNFKSNFDLAEDAKLQLSKDTYDDDLDNLLAQIGDQYADLFLAAKNLSDAILLSDILRVNTEITKAPLSASMIKRYDEHHQDLTLLKALVRQQLPEKYKEIFFDQSKNGYAGYIDGGASQEEFYKFIKPILEKMDGTEELLVKLNREDLLRKQRTFDNGSIPHQIHLGELHAILRRQEDFYPFLKDNREKIEKILTFRIPYYVGPLARGNSRFAWMTRKSEETITPWNFEEVVDKGASAQSFIERMTNFDKNLPNEKVLPKHSLLYEYFTVYNELTKVKYVTEGMRKPAFLSGEQKKAIVDLLFKTNRKVTVKQLKEDYFKKIECFDSVEISGVEDRFNASLGTYHDLLKIIKDKDFLDNEENEDILEDIVLTLTLFEDREMIEERLKTYAHLFDDKVMKQLKRRRYTGWGRLSRKLINGIRDKQSGKTILDFLKDGFANRNFMQLIHDDSLTFKEDIQKAQVSGQGDSLHEHIANLAGSPAIKKGILQTVKVVDELVKVMGRHKPENIVIEMARENQTTQKGQKNSRERMKRIEEGIKELGSQILKEHPVENTQLQNEKLYLYYLQNGRDMYVDQELDINRLSDYDVDHIVPQSFLKDDSIDNKVLTRSDKNRGKSDNVPSEEVVKKMKNYWRQLLNAKLITQRKFDNLTKAERGGLSELDKAGFIKRQLVETRQITKHVAQILDSRMNTKYDENDKLIREVKVITLKSKLVSDFRKDFQFYKVREINNYHHAHDAYLNAVVGTALIKKYPKLESEFVYGDYKVYDVSEQEIGKATAKYFFYSNIMNFFKTEITLANGEIRKRPLIETNGETGEIVWDKGRDFATVRKVLSMPQVNIVKKTEVQTGGFSKESILPKRNSDKLIARKKDWDPKKYGGFDSPTVAYSVLVVAKVEKGKSKKLKSVKELLGITIMERSSFEKNPIDFLEAKGYKEVKKDLIIKLPKYSLFELENGRKRMLASGELQKGNELALPSKYVNFLYLASHYEKLKGSPEDNEQKQLFVEQHKHYLDEIIEQISEFSKRVILADANLDKVLSAYNKHRDKPIREQAENIIHLFTLTNLGAPAAFKYFDTTIDRKRYTSTKEVLDATLIHQSITGLYETRIDLSQLGGD

SEQ ID NO: 32 - protein, 1359 aa, Streptococcus pyogenes
MDKKYSIGLDIGTNSVGWAVITDDYKVPSKKFKVLGNTDRHSIKKNLIGALLFDSGETAEATRLKRTARRRYTRRKNRICYLQEIFSNEMAKVDDSFFHRLEESFLVEEDKKHERHPIFGNIVDEVAYHEKYPTIYHLRKKLADSTDKADLRLIYLALAHMIKFRGHFLIEGDLNPDNSDVDKLFIQLVQTYNQLFEENINASRVDAKAILSARLSKSRRLENLIAQLPGEKKNGLFGNLIALLLGLTPNFKSNFDLAEDAKLQLSKDTYDDDLDNLLAQIGDQYADLFLAAKNLSDAILLSDILRVNSEITKAPLSASMIKRYDEHHQDLTLLKALVRQQLPEKYKEIFFDQSKNGYAGYIDGGASQEEFYKFIKPILEKMDGTEELLAKLNREDLLRKQRTFDNGSIPHQIHLGELHAILRRQEDFYPFLKDNREKIEKILTFRIPYYVGPLARGNSRFAWMTRKSEETITPWNFEEVVDKGASAQSFIERMTNFDKNLPNEKVLPKHSLLYEYFTVYNELTKVKYVTEGMRKPAFLSGEQKKAIVDLLFKTNRKVTVKQLKEDYFKKIECFDSVEISGVEDRFNASLGTYHDLLKIIKDKDFLDNEENEDILEDIVLTLTLFEDKEMIEERLKKYAHLFDDKVMKQLKRRRYTGWGRLSRKLINGIRDKQSGKTILDFLKDGFANRNFMQLIHDDSLTFKEDIQKAQVSGQGDSLHEHIANLAGSPAIKKGILQTVKVVDELVKVMGRHKPENIVIEMARENQTTQKGQKNSRERMKRIEEGIKELGSDILKEYPVENTQLQNEKLYLYYLQNGRDMYVDQELDINRLSDYDVDHIVPQSFLKDDSIDNKVLTRSDKNRGKSDNVPSEEVVKKMKNYWKQLLNAKLITQRKFDNLTKAERGGLSELDKAGFIKRQLVETRQITKHVAQILDSRMNTKYDENDKLIREVRVITLKSKLVSDFRKDFQFYKVREINNYHHAHDAYLNAVVGTALIKKYPKLESEFVYGDYKVYDVSEQEIGKATAKYFFYSNIMNFFKTEITLANGEIRKRPLIETNGETGEIVWDKGRDFATVRKVLSMPQVNIVKKTEVQTGGFSKESILPKRNSDKLIARKKDWDPKKYGGFDSPTVAYSVLVVAKVEKGKSKKLKSVKELLGITIMERSSFEKNPIDFLEAKGYKEVRKDLIIKLPKYSLFELENGRKRMLASGELQKGNELALPSKYVNFLYLASHYEKLKGSPEDNEQKQLFVEQHKHYLDEIIEQISEFSKRVILADANLDKVLSAYNKHRDKPIREQAENIIHLFTLTNLGAPAAFKYFDTTIDRKRYTSTKEVLDATLIHQSITGLYETRIDLSQLGGD

SEQ ID NO: 33 - protein, 1359 aa, Streptococcus pyogenes
MDKKYSIGLDIGTNSVGWAVITDDYKVPSKKFKVLGNTDRHSIKKNLIGALLFDSGEIAEATRLKRTARRRYTRRKNRICYLQEIFSNEMAKVDDSFFHRLEESFLVEEDKKHERHPIFGNIVDEVAYHEKYPTIYHLRKKLVDSTDKADLRLIYLALAHMIKFRGHFLIEGDLNPDNSDVDKLFIQLVQTYNQLFEENINASGVDAKAILSARLSKSRRLENLIAQLPGEKKNGLFGNLIALSLGLTPNFKSNFDLAEDAKLQLSKDTYDDDLDNLLAQIGDQYADLFLAAKNLSDAILLSDILRLNSEITKAPLSASMIKRYDEHHQDLTLLKALVRQQLPEKYKEIFFDQSKNGYAGYIDGGASQEEFYKFIKPILEKMDGTEELLAKLNRKDLLRKQRTFDNGSIPHQIHLGELHAILRRQEDFYPFLKDNREKIEKILTFRIPYYVGPLARGNSRFAWMTRKSEETITPWNFEEVVDKGASAQSFIERMTNFDKNLPNEKVLPKHSLLYEYFTVYNELTKVKYVTEGMRKPAFLSGEQKKAIVDLLFKTNRKVTVKQLKEDYFKKIECFDSVEISGVEDRFNASLGTYHDLLKIIKDKDFLDNEENEDILEDIVLTLTLFEDREMIEERLKTYAHLFDDKVMKQLKRRRYTGWGRLSRKLINGIRDKQSGKTILDFLKDGFANRNFMQLIHDDSLTFKEDIQKAQVSGQGDSLHEHIANLAGSPAIKKGILQTVKVVDELVKVMGRHKPENIVIEMARENQTTQKGQKNSRERMKRIEEGIKELGSQILKEHPVENTQLQNEKLYLYYLQNGRDMYVDQELDINRLSDYDVDHIVPQSFIKDDSIDNKVLTRSDKNRGKSDNVPSEEVVKKMKNYWRQLLNAKLITQRKFDNLTKAERGGLSELDKAGFIKRQLVETRQITKHVAQILDSRMNTKYDENDKLIREVKVITLKSKLVSDFRKDFQFYKVREINNYHHAHDAYLNAVVGTALIKKYPKLESEFVYGDYKVYDVSEQEIGKATAKYFFYSNIMNFFKTEITLANGEIRKRPLIETNGETGEIVWDKGRDFATVRKVLSMPQVNIVKKTEVQTGGFSKESILPKRNSDKLIARKKDWDPKKYGGFDSPTVAYSVLVVAKVEKGKSKKLKSVKELLGITIMERSSFEKNPIDFLEAKGYKEVRKDLIIKLPKYSLFELENGRKRMLASGELQKGNELALPSKYVNFLYLASHYEKLKGSPEDNEQKQLFVEQHKHYLDEIIEQISEFSKRVILADANLDKVLSAYNKHRDKPIREQAENIIHLFTLTNLGAPTAFKYFDTTIDRKRYTSTKEVLDATFIHQSITGLYETRIDLSQLGGD

SEQ ID NO: 34 - protein, 1184 aa, Streptococcus pyogenes
PDNSDVDKLFIQLVQTYNQLFEENINASGVDAKAILSARLSKSRRLENLIAQLPGEKKNGLFGNLIALSLGLTPNFKSNFDLAEDAKLQLSKDTYDDDLDNLLAQIGDQYADLFLAAKNLSDAILLSDILRVNTEITKAPLSASMIKRYDEHHQDLTLLKALVRQQLPEKYKEIFFDQSKNGYAGYIDGGASQEEFYKFIKPILEKMDGTEELLVKLNREDLLRKQRTFDNGSIPHQIHLGELHAILRRQEDFYPFLKDNREKIEKILTFRIPYYVGPLARGNSRFAWMTRKSEETITPWNFEEVVDKGASAQSFIERMTNFDKNLPNEKVLPKHSLLYEYFTVYNELTKVKYVTEGMRKPAFLSGEQKKAIVDLLFKTNRKVTVKQLKEDYFKKIECFDSVEISGVEDRFNASLGTYHDLLKIIKDKDFLDNEENEDILEDIVLTLTLFEDREMIEERLKTYAHLFDDKVMKQLKRRRYTGWGRLSRKLINGIRDKQSGKTILDFLKDGFANRNFMQLIHDDSLTFKEDIQKAQVSGQGDSLHEHIANLAGSPAIKKGILQTVKVVDELVKVMGRHKPENIVIEMARENQTTQKGQKNSRERMKRIEEGIKELGSQILKEHPVENTQLQNEKLYLYYLQNGRDMYVDQELDINRLSDYDVDHIVPQSFLKDDSIDNKVLTRSDKNRGKSDNVPSEEVVKKMKNYWRQLLNAKLITQRKFDNLTKAERGGLSELDKAGFIKRQLVETRQITKHVAQILDSRMNTKYDENDKLIREVKVITLKSKLVSDFRKDFQFYKVREINNYHHAHDAYLNAVVGTALIKKYPKLESEFVYGDYKVYDVSEQEIGKATAKYFFYSNIMNFFKTEITLANGEIRKRPLIETNGETGEIVWDKGRDFATVRKVLSMPQVNIVKKTEVQTGGFSKESILPKRNSDKLIARKKDWDPKKYGGFDSPTVAYSVLVVAKVEKGKSKKLKSVKELLGITIMERSSFEKNPIDFLEAKGYKEVKKDLIIKLPKYSLFELENGRKRMLASGELQKGNELALPSKYVNFLYLASHYEKLKGSPEDNEQKQLFVEQHKHYLDEIIEQISEFSKRVILADANLDKVLSAYNKHRDKPIREQAENIIHLFTLTNLGAPAAFKYFDTTIDRKRYTSTKEVLDATLIHQSITGLYETRIDLSQLGGD

SEQ ID NO: 35 - protein, 1359 aa, Streptococcus pyogenes
MDKKYSIGLDIGTNSVGWAVITDDYKVPSKKFKVLGNTDRHSIKKNLIGALLFDSGETAEATRLKRTARRRYTRRKNRICYLQEIFSNEMAKVDDSFFHRLEESFLVEEDKKHERHPIFGNIVDEVAYHEKYPTIYHLRKKLADSTDKADLRLIYLALAHMIKFRGHFLIEGDLNPDNSDVDKLFIQLVQTYNQLFEENINASRVDAKAILSARLSKSRRLENLIAQLPGEKKNGLFGNLIALSLGLTPNFKSNFDLAEDAKLQLSKDTYDDDLDNLLAQIGDQYADLFLAAKNLSDATLLSDILRVNSEITKAPLSASMIKRYDEHHQDLTLLKALVRQQLPEKYKEIFFDQSKNGYAGYIDGGASQEEFYKFIKPILEKMDGTEELLAKLNREDLLRKQRTFDNGSIPHQIHLGELHAILRRQEDFYPFLKDNREKIEKILTFRIPYYVGPLARGNSRFAWMTRKSEETITPWNFEEVVDKGASAQSFIERMTNFDKNLPNEKVLPKHSLLYEYFTVYNELTKVKYVTEGMRKPAFLSGEQKKAIVDLLFKTNRKVTVKQLKEDYFKKIECFDSVEISGVEDRFNASLGTYHDLLKIIKDKDFLDNEENEDILEDIVLTLTLFEDREMIEERLKTYAHLFDDKVMKQLKRRRYTGWGRLSRKLINGIRDKQSGKTILDFLKDGFANRNFMQLIHDDSLTFKEDIQKAQVSGQGDSLHEHIANLAGSPAIKKGILQTVKVVDELVKVMGRHKPENIVIEMARENQTTQKGQKNSRERMKRIEEGIKELGSDILKEYPVENTQLQNEKLYLYYLQNGRDMYVDQELDINRLSDYDVDHIVPQSFLKDDSIDNKVLTRSDKNRGKSDNVPSEEVVKKMKNYWRQLLNAKLITQRKFDNLTKAERGGLSELDKAGFIKRQLVETRQITKHVAQILDSRMNTKYDENDKLIREVKVITLKSKLVSDFRKDFQFYKVREINNYHHAHDAYLNAVVGTALIKKYPKLESEFVYGDYKVYDVSEQEIGKATAKYFFYSNIMNFFKTEITLANGEIRKRPLIETNGETGEIVWDKGRDFATVRKVLSMPQVNIVKKTEVQTGGFSKESILPKRNSDKLIARKKDWDPKKYGGFDSPTVAYSVLVVAKVEKGKSKKLKSVKELLGITIMERSSFEKNPIDFLEAKGYKEVRKDLIIKLPKYSLFELENGRKRMLASGELQKGNELALPSKYVNFLYLASHYEKLKGSPEDNEQKQLFVEQHKHYLDEIIEQISEFSKRVILADANLDKVLSAYNKHRDKPIREQAENIIHLFTLTNLGAPAAFKYFDTTIDRKRYTSTKEVLDATLIHQSITGLYETRIDLSQLGGD

SEQ ID NO: 36 - protein, 1358 aa, Streptococcus pyogenes
MDKKYSIGLDIGTNSVGWAVITDDYKVPSKKFKVLGNTDRHSIKKNLIGALLFDSGETAEATRLKRTARRRYTRRKNRICYLQEIFSNEMAKVDDSFFHRLEESFLVEEDKKHERHPIFGNIVDEVAYHEKYPTIYHLRKKLADSTDKVDLRLIYLALAHMIKFRGHFLIEGDLNPDNSDVDKLFIQLVQTYNQLFEENINASRVDAKAILSARLSKSRRLENLIAQLPGEKKNGLFGNLIALSLGLTPNFKSNFDLAEDTKLQLSKDTYDDDLDNLLAQIGDQYADLFLAAKNLSDAILLSDILRVNSEITKAPLSASMIKRYDEHHQDLTLLKALVRQQLPEKYKEIFFDQSKNGYAGYIDGGASQEEFYKFIKPILEKMDGTEELLAKLNREDLLRKQRTFDNGSIPYQIHLGELHAILRRQEDFYPFLKDNREKIEKILTFRIPYYVGPLARGNSRFAWMTRKSEETITPWNFEEVVDKGASAQSFIERMTNFDKNLPNEKVLPKHSLLYEYFTVYNELTKVKYVTEGMRKPAFLSGEQKKAIVDLLFKTNRKVTVKQLKEDYFKKIECFDSVEISGVEDRFNTSLGTYHDLLKIIKDKDFLDNEENEDILEDIVLTLTLFEDKEMIEERLKKYANLFDDKVMKQLKRRHYTGWGRLSRKLINGIRDKQSGKTILDFLKDGFANRNFMQLINDDSLTFKEAIQKAQVSGQGHSLHEQIANLAGSPAIKKGILQTVKIVDELVKVMGHKPENIVIEMARENQTTQKGQKNSRERMKRIEEGIKELGSQILKEHPVENTQLQNEKLYLYYLQNGRDMYVDQELDINRLSDYDVDHIVPQSFLKDDSIDNKVLTRSDKNRGKSDNVPSEEVVKKMKNYWRQLLNAKLITQRKFDNLTKAERGGLSELDKAGFIKRQLVETRQITKHVAQILDSRMNTKYDENDKLIREVKVITLKSKLVSDFRKDFQFYKVREINNYHHAHDAYLNAVVGTALIKKYPKLESEFVYGDYKVYDVSEQEIGKATAKYFFYSNIMNFFKTEITLANGEIRKRPLIETNGETGEIVWDKGRDFATVRKVLSMPQVNIVKKTEVQTGGFSKESILPKRNSDKLIARKKDWDPKKYGGFDSPTVAYSVLVVAKVEKGKSKKLKSVKELLGITIMERSSFEKNPIDFLEAKGYKEVRKDLIIKLPKYSLFELENGRKRMLASGELQKGNELALPSKYVNFLYLASHYEKLKGSPEDNEQKQLFVEQHKHYLDEIIEQISEFSKRVILADANLDKVLSAYNKHRDKPIREQAKNIIHLFTLTNLGAPAAFKYFDTTIERNRYKSIKEVLDATLIHQSITGLYETRIDLSQLGGD

SEQ ID NO: 37 - protein, 1359 aa, Streptococcus pyogenes
MDKKYSIGLDIGTNSVGWAVITDDYKVPSKKFKVLGNTDRHSIKKNLIGALLFDSGETAEATRLKRTARRRYTRRKNRICYLQEIFSNEMAKVDDSFFHRLEESFLVEEDKKHERHPIFGNIVDEVAYHEKYPTIYHLRKKLADSTDKADLRLIYLALAHMIKFRGHFLIEGDLNPDNSDVDKLFIQLVQTYNQLFEENINASRVDAKAILSARLSKSRRLENLIAQLPGEKRNGLFGNLIALSLGLTPNFKSNFDLAEDAKLQLSKDTYDDDLDNLLAQIGDQYADLFLAAKNLSDAILLSDILRVNSEITKAPLSASMIKRYDEHHQDLTLLKALVRQQLPEKYKEIFFDQSKNGYAGYIDGGASQEEFYKFIKPILEKMDGTEELLAKLNREDLLRKQRTFDNGSIPHQIHLGELHAILRRQEDFYPFLKDNREKIEKILTFRIPYYVGPLARGNSRFAWMTRKSEETITPWNFEEVVDKGASAQSFIERMTNFDKNLPNEKVLPKHSLLYEYFTVYNELTKVKYVTEGMRKPAFLSGEQKKAIVDLLFKTNRKVTVKQLKEDYFKKIECFDSVEISGVEDRFNASLGTYHDLLKIIKDKDFLDNEENEDILEDIVLTLTLFEDREMIEERLKTYAHLFDDKVMKQLKRRRYTGWGRLSRKLINGIRDKQSGKTILDFLKDGFANRNFMQLIHDDSLTFKEDIQKAQVSGQGDSLHEHIANLAGSPAIKKGILQTVKIVDELVKVMGRHKPENIVIEMARENQTTQKGQKNSRERMKRIEEGIKELGSDILKEYPVENTQLQNEKLYLYYLQNGRDMYVDQELDINRLSDYDVDHIVPQSFLKDDSIDNKVLTRSDKNRGKSDNVPSEEVVKKMKNYWKQLLNAKLITQRKFDNLTKAERGGLSELDKAGFIKRQLVETRQITKHVAQILDSRMNTKYDENDKLIREVKVITLKSKLVSDFRKDFQFYKVREINNYHHAHDAYLNAVVGTALIKKYPKLESEFVYGDYKVYDVSEQEIGKATAKYFFYSNIMNFFKTEITLANGEIRKRPLIETNGETGEIVWDKGRDFATVRKVLSMPQVNIVKKTEVQTGGFSKESILPKRNSDKLIARKKDWDPKKYGGFDSPTVAYSVLVVAKVEKGKSKKLKSVKELLGITIMERSSFEKNPIDFLEAKGYKEVRKDLIIKLPKYSLFELENGRKRMLASGELQKGNELALPSKYVNFLYLASHYEKLKGSPEDNEQKQLFVEQHKHYLDEIIEQISEFSKRVILADANLDKVLSAYNKHRDKPIREQAENIIHLFTLTNLGAPAAFKYFDTTIGRNRYKSIKEVLDATLIHQSITGLYETRIDLSQLGGD

SEQ ID NO: 38 - protein, 1270 aa, Streptococcus pyogenes
MAKVDDSFFHRLEESFLVEEDKKHERHPIFGNIVDEVAYHEKYPTIYHLRKKLVDSTDKADLRLIYLALAHMIKFRGHFLIEGDLNPDNSDVDKLFIQLVQTYNQLFEENINASGVDAKAILSARLSKSRRLENLIAQLPGEKKNGLFGNLIALSLGLTPNFKSNFDLAEDAKLQLSKDTYDDDLDNLLAQIGDQYADLFLAAKNLSDAILLSDILRVNTEITKAPLSASMIKRYDEHHQDLTLLKALVRQQLPEKYKEIFFDQSKNGYAGYIDGGASQEEFYKFIKPILEKMDGTEELLVKLNREDLLRKQRTFDNGSIPHQIHLGELHAILRRQEDFYPFLKDNREKIEKILTFRIPYYVGPLARGNSRFAWMTRKSEETITPWNFEEVVDKGASAQSFIERMTNFDKNLPNEKVLPKHSLLYEYFTVYNELTKVKYVTEGMRKPAFLSGEQKKAIVDLLFKTNRKVTVKQLKEDYFKKIECFDSVEISGVEDRFNASLGTYHDLLKIIKDKDFLDNEENEDILEDIVLTLTLFEDREMIEERLKTYAHLFDDKVMKQLKRRRYTGWGRLSRKLINGIRDKQSGKTILDFLKDGFANRNFMQLIHDDSLTFKEDIQKAQVSGQGDSLHEHIANLAGSPAIKKGILQTVKVVDELVKVMGRHKPENIVIEMARENQTTQKGQKNSRERMKRIEEGIKELGSQILKEHPVENTQLQNEKLYLYYLQNGRDMYVDQELDINRLSDYDVDHIVPQSFLKDDSIDNKVLTRSDKNRGKSDNVPSEEVVKKMKNYWRQLLNAKLITQRKFDNLTKAERGGLSELDKAGFIKRQLVETRQITKHVAQILDSRMNTKYDENDKLIREVKVITLKSKLVSDFRKDFQFYKVREINNYHHAHDAYLNAVVGTALIKKYPKLESEFVYGDYKVYDVSEQEIGKATAKYFFYSNIMNFFKTEITLANGEIRKRPLIETNGETGEIVWDKGRDFATVRKVLSMPQVNIVKKTEVQTGGFSKESILPKRNSDKLIARKKDWDPKKYGGFDSPTVAYSVLVVAKVEKGKSKKLKSVKELLGITIMERSSFEKNPIDFLEAKGYKEVKKDLIIKLPKYSLFELENGRKRMLASGELQKGNELALPSKYVNFLYLASHYEKLKGSPEDNEQKQLFVEQHKHYLDEIIEQISEFSKRVILADANLDKVLSAYNKHRDKPIREQAENIIHLFTLTNLGAPAAFKYFDTTIDRKRYTSTKEVLDATLIHQSITGLYETRIDLSQLGGD

SEQ ID NO: 39 - protein, 536 aa, Streptococcus pyogenes
QELDINRLSGYDVDHIVPQSFLKDDSIDNKVLTRSDKNRGKSDNVPSEEVVKKMKNYWRQLLNAKLITQRKFDNLTKAERGGLSELDKVGFIKRQLVETRQITKHVAQILDSRMNTKYDENDKLIREVRVITLKSKLVSDFRKDFQFYKVREINNYHHAHDAYLNAVVGTALIKKYPKLESEFVYGDYKVYDVSEQEIGKATAKYFFYSNIMNFFKTEITLANGEIRKRPLIETNGETGEIVWDKGRDFATVRKVLSMPQVNIVKKTEVQTGGFSKESILPKRNSDKLIARKKDWDPKKYGGFDSPTVAYSVLVVAKVEKGKSKKLKSVKELLGITIMERSSFEKDPIDFLEAKGYKEVRKDLIIKLPKYSLFELENGRKRMLASGELQKGNELALPSKYVNFLYLASHYEKLKGSPEDNEQKQLFVEQHKHYLDEIIEQISEFSKRVILADANLDKVLSAYNKHRDKPIREQAENIIHLFTLTNLGAPAAFKYFDTTIDRKRYTSTKEVLDATLIHQSITGLYETRIDLSQLGGD

SEQ ID NO: 40 - protein, 305 aa, Streptococcus pyogenes
IETNGETGEIVWDKGRDFATVRKVLSMPQVNIVKKTEVQTGGFSKESILPKRNSDKLIARKKDWDPKKYGGFDSPTVAYSVLVVAKVEKGKSKKLKSVKELLGITIMERSSFEKDPIDFLEAKGYKEVRKDLIIKLPKYSLFELENGRKRMLASGELQKGNELALPSKYVNFLYLASHYEKLKGSPEDNEQKQLFVEQHKHYLDEIIEQISEFSKRVILADANLDKVLSAYNKHRDKPIREQAENIIHLFTLTNLGAPAAFKYFDTTIDRKRYTSTKEVLDATLIHQSITGLYETRIDLSQLGGD

SEQ ID NO: 41 - protein, 1359 aa, synthetic construct
  REGION 1..1359: note = Synthetic Polypeptide
MDKKYSIGLDIGTNSVGWAVITDDYKVPSKKFKVLGNTDRHSIKKNLIGALLFDSGEIAEATRLKRTARRRYTRRKNRICYLQEIFSNEMAKVDDSFFHRLEESFLVEEDKKHERHPIFGNIVDEVAYHEKYPTIYHLRKKLVDSTDKADLRLIYLALAHMIKFRGHFLIEGDLNPDNSDVDKLFIQLVQTYNQLFEENINASGVDAKAILSARLSKSRRLENLIAQLPGEKKNGLFGNLIALSLGLTPNFKSNFDLAEDAKLQLSKDTYDDDLDNLLAQIGDQYADLFLAAKNLSDAILLSDILRLNSEITKAPLSASMIKRYDEHHQDLTLLKALVRQQLPEKYKEIFFDQSKNGYAGYIDGGASQEEFYKFIKPILEKMDGTEELLAKLNREDLLRKQRTFDNGSIPHQIHLGELHAILRRQEDFYPFLKDNREKIEKILTFRIPYYVGPLARGNSRFAWMTRKSEETITPWNFEEVVDKGASAQSFIERMTNFDKNLPNEKVLPKHSLLYEYFTVYNELTKVKYVTEGMRKPAFLSGEQKKAIVDLLFKTNRKVTVKQLKEDYFKKIECFDSVEISGVEDRFNASLGTYHDLLKIIKDKDFLDNEENEDILEDIVLTLTLFEDREMIEERLKTYAHLFDDKVMKQLKRRRYTGWGRLSRKLINGIRDKQSGKTILDFLKDGFANRNFMQLIHDDSLTFKEDIQKAQVSGQGDSLHEHIANLAGSPAIKKGILQTVKVVDELVKVMGRHKPENIVIEMARENQTTQKGQKNSRERMKRIEEGIKELGSQILKEHPVENTQLQNEKLYLYYLQNGRDMYVDQELDINRLSDYDVDHIVPQSFIKDDSIDNKVLTRSDKNRGKSDNVPSEEVVKKMKNYWRQLLNAKLITQRKFDNLTKAERGGLSELDKAGFIKRQLVETRQITKHVAQILDSRMNTKYDENDKLIREVKVITLKSKLVSDFRKDFQFYKVREINNYHHAHDAYLNAVVGTALIKKYPKLESEFVYGDYKVYDVSEQEIGKATAKYFFYSNIMNFFKTEITLANGEIRKRPLIETNGETGEIVWDKGRDFATVRKVLSMPQVNIVKKTEVQTGGFSKESILPKRNSDKLIARKKDWDPKKYGGFDSPTVAYSVLVVAKVEKGKSKKLKSVKELLGITIMERSSFEKNPIDFLEAKGYKEVRKDLIIKLPKYSLFELENGRKRMLASGELQKGNELALPSKYVNFLYLASHYEKLKGSPEDNEQKQLFVEQHKHYLDEIIEQISEFSKRVILADANLDKVLSAYNKHRDKPIREQAENIIHLFTLTNLGAPTAFKYFDTTIDRKRYTSTKEVLDATFIHQSITGLYETRIDLSQLGGD

SEQ ID NO: 42 - protein, 1341 aa, synthetic construct
  REGION 1..1341: note = Synthetic Polypeptide
MDQKYSIGLDIGTNSVGWAVVTDDYKVPAKKMKVLGNTDKQSIKKNLLGALLFDSGETAEATRLKRTARRRYTRRRNRLRYLQEIFAEEMNKVDENFFQRLDDSFLVDEDKRGERHPIFGNIAAEVKYHDDFPTIYHLRKHLADISQKADLRLVYLALAHMIKFRGHFLIEGQLKAENTNVQALFKDFVEVYDKTVEESHLSEMTVDALSILTEKVSKSRRLENLIAHYPAEKKNTLFGNLIALSLGLQPNFKTNFQLSEDAKLQFSKDTYEEDLEGLLGEIGDEYADLFASAKNLYDAILLSGILTVDDNSTKAPLSASMVKRYEEHQKDLKKLKDFIKVNAPDQYNAIFKDKNKKGYAGYIENGVKQDEFYKYLKGILLQINGSGDFLDKIDREDFLRKQRTFDNGSIPHQIHLQEMHAILRRQEEHYPFLKENQDKIEKILTFRIPYYVGPLARKGSRFAWAEYKADEKITPWNFDDILDKEKSAEKFITRMTLNDLYLPEEKVLPKHSLLYETFTVYNELTKVKYVNEQGEAKFFDANMKQEIFDHVFKENRKVTKDKLLNYLNKEFEEFRIVNLTGLDKENKAFNSSLGTYHDLRKILDKSFLDDKANEKTIEDIIQTLTLFEDREMIRQRLQKYSDIFTKAQLKKLERRHYTGWGRLSYKLINGIRNKENKKTILDYLIDDGYANRNFMQLINDDALSFKEEIARAQIIGDVDDIANVVHDLPGSPAIKKGILQSVKIVDELVKVMGHNPANIIIEMARENQMTDKGRRNSQQRLKLLQDSLKPVNIKNVENQQLQNDRLFLYYIQNGKDMYTGETLDINNLSQYDIDHIIPQAFIKDNSLDNRVLTRSDKNRGKSDDVPSIEVVHEMKSFWSKLLSVKLITQRKFDNLTKAERGGLTEEDKAGFIKRQLVETRQITKHVAQILDERFNTEFDGNKRRIRNVKIITLKSNLVSNFRKEFELYKVREINDYHHAHDAYLNAVVGNALLLKYPQLEPEFVYGEYPKYNSYRSRKSATEKFLFYSNILRFFKKEDIQTNEDGEIAWNKEKHIKILRKVLSYPQVNIVKKTEEQTGGFSKESILPKGESDKLIPRKTKNSYWNPKKYGGFDSPVVAYSILVFADVEKGKSKKLRKVQDMVGITIMEKKRFEKHPVDFLEQRGYRNVRLEKIIKLPKYSLFELENKRRRLLASARELQKGNELVIPQRFTTLLYHSYQIEKNYEPEHREYVEKHKDEFKELLEYISVFSRKYVLADNNLTKIEMLFSKNKDAEVSSLAKSFISLLTFTAFGAPAAFNFFGENIDRKRYTSVTECLNATLIHQSITGLYETRIDLSKLGED

SEQ ID NO: 43 - protein, 1356 aa, synthetic construct
  REGION 1..1356: note = Synthetic Polypeptide
MTKKNYSIGLDIGTNSVGWAVITDDYKVPAKKMKVLGNTDKKYIKKNLLGALLFDSGETAEATRLKRTARRRYTRRKNRLRYLQEIFAEEMTKVDESFFQRLDESFLRWDDDNKKLGRYPIFGNKADVVKYHQEFPTIYHLRKHLADSSEKADLRLVYLALAHMIKFRGHFLIEGELNAENTDVQKIFADFVGVYDRTFDDSHLSEITVDAASILTEKISKSRRLENLIKYYPTEKKNTLFGNLIALALGLQPNFKMNFKLSEDAKLQFSKDSYEEDLGELLGKIGDDYADLFTSAKNLYDAILLSGILIVDDNSTKAPLSASMIKRYVEHQEDLEKLKEFIKANKSELYHDIFKDKNKNGYAGYIENGVKQDEFYKYLKNTLSKIAGSDYFLDKIEREDFLRKQRTFDNGSIPHQIHLQEMHAILRRQGDYYPFLKENQDRIEKILTFRIPYYVGPLARKDSRFSWAEYHSDEKITPWNFDKVIDKEKSAEKFITRMTLNDLYLPEEKVLPKHSHVYETYAVYNELTKIKYVNEQGKDSFFDSNMKQEIFDHVFKENRKVTKEKLLNYLNKEFPEYRIKDLIGLDKENKSFNASLGTYHDLKKILDKAFLDDKVNEEVIEDIIKTLTLFEDKDMIHERLQKYSDIFTADQLKKLERRHYTGWGRLSYKLINGIRNKENNKTILDYLIDDGSANRNFMQLINDDTLPFKQIIQKSQVVGDVDDIEAVVHDLPGSPAIKKGILQSVKIVDELVKVMGDNPDNIVIEMARENQTTNRGRSQSQQRLKKLQNSLKPSYIEDKVENSHLQNDQLFLYYIQNGKDMYTGDELDIDHLSDYDIDHIIPQAFIKDDSIDNRVLTSSAKNRGKSDDVPSLDIVRARKAEWVRLYKSGLISKRKFDNLTKAERGGLTEADKAGFIKRQLVETRQITKHVAQILDARFNTESDENDKVIRDVKVITLKSNLVSQFRKDFEFYKVREINDYHHAHDAYLNAVVGTALLKKYPKLASEFVYGEYKKYDISSDKATAKYFFYSNLMNFFKRVIRYSNGKVIVRPVVEYSKDTEDIAWDKKSNFRTICKVLSYPQVNIVKKVETQTGGFSKESILPKGDSDKLIPRKTKKAYWDTKKYGGFDSPTVAYSVFVVADVEKGKAKKLKTVKELVGISIMERSFFEENPVEFLENKGYHNIREDKLIKLPKYSLFEFEGGKRRLLASASELQKGNEMVIPGHLVKLLYHAQRINSFNSTKYLDYVSAHKKEFEKVLSCVEDFANLYVDVEKNLSKIRAVADSMDNFSIEEISNSFINLLTLTALGAPADFNFLGEKIPRKRYTSTKECLNATLIHQSITGLYETRIDLSKIGEE

SEQ ID NO: 44 - protein, 1365 aa, Streptococcus agalactiae
MNKPYSIGLDIGTNSVGWSIITDDYKVPAKKIRVLGNTDKEYIKKNLIGALLFDGGNTAADRRLKRTARRRYTRRRNRILYLQEIFAEEMSKVDDSFFHRLEDSFLVEEDKRGSKYPIFATLQEEKYYHEKFPTIYHLRKELADKKEKADLRLVYLALAHIIKFRGHFLIEDDRFDVRNTDIQKQYQAFLEIFDTTFENNDLLSQDVDVEAILTDKISKSAKKDRILAQYPNQKSTGIFAEFLKLIVGNQADFKKHFNLEDKTPLQFAKDSYDEDLENLLGQIGDEFADLFSAAKKLYDSVLLSGILTVTDLSTKAPLSASMIQRYDEHREDLKQLKQFVKASLPEKYQEIVADSSKDGYAGYIEGKTNQEAFYKYLSKLLTKQEGSEYFLEKIKNEDFLRKQRTFDNGSIPHQVHLTELRAIIRRQSEYYPFLKENLDRIEKILTFRIPYYVGPLAREKSDFAWMTRKTDDSIRPWNFEDLVDKEKSAEAFIHRMTNNDLYLPEEKVLPKHSLIYEKFTVYNELTKVRFLAEGFKDFQFLNRKQKETIFNSLFKEKRKVTEKDIISFLNKVDGYEGIAIKGIEKQFNASLSTYHDLKKILGKDFLDNTDNELILEDIVQTLTLFEDREMIKKRLDIYKDFFTESQLKKLYRRHYTGWGRLSAKLINGIRNKENQKTILDYLIDDGSANRNFMQLIKDAGLSFKPIIDKARTGSHSDNLKEVIGELAGSPAIKKGILQSLKIVDELVKVMGYEPEQIVVEMARENQTTAKGLSRSRQRLTTLRESLANLKSEKKPKYVKDQVENHHLSDDRLFLYYLQNGKDMYTDDELDIDNLSQYDIDHIIPQAFIKDDSIDNRVLVSSAKNRGKSDDVPSLEIVKDCKVFWKKLLDAKLMSQRKYDNLTKAERGGLTSDDKARFIQRQLVETRQITKHVARILDERFNNELDSKGRRIRKVKIVTLKSNLVSNFRKEFVFYKIREVNNYHHAHDAYLNAVVAKAILTKYPQLEPEFVYGDYPKYNSYKTRKATEKLFFYSNIMNFFKTKVTLADGTVVVKDDIEVNNDTGEIVWDKKKHFATVRKVLSYPQVNIVKKTEIQTGGFSKESILAHGNSDKLIPRKTKDIYLDPKKYGGFDSPIVAYSVLVVADIKKGKAQKLKTVTELLGITIMERSRFEKNPSAFLESKGYLNIRTDKLIILPKYSLFELENGRRRLLASAGELQKGNELALPTQFMKFLYLASRYNESKGKPEEIEKKQEFVNQHVSYFDDIFQIINDFSKRVILADANLEKINRLYQDNKENIPVDELANNIINLFTFTSLGAPAAFKFFDKIVDRKRYTSTKEVLNSTLIHQSITGLYETRIDLGKLGED

SEQ ID NO: 45 - protein, 1365 aa, Streptococcus agalactiae
MNKPYSIGLDIGTNSVGWSIITDDYKVPAKKMRVLGNTDKEYIKKNLIGALLFDGGNTAADRRLKRTARRRYTRRRNRILYLQEIFAEEMSKVDDSFFHRLEDSFLVEEDKRGSKYPIFATLQEEKDYHEKFPTIYHLRKELADKQEKADLRLIYLALAHIIKFRGHFLIEDDRFDVRNTDIQKQYQAFLEIFDTTFENNHLLSQNVDVEAILTDKISKSAKKDRILAQYPNQKSTGIFAEFLKLIVGNQADFKKHFNLEDKTPLQFAKDSYDEDLENLLGQIGDEFADLFSAAKKLYDSVLLSGILTVIDLSTKAPLSASMIQRYDEHREDLKQLKQFVKASLPEKYQEIFADSSKDGYAGYIEGKTNQEAFYKYLSKLLTKQEDSENFLEKIKNEDFLRKQRTFDNGSIPHQVHLTELKAIIRRQSEYYPFLKENQDRIEKILTFRIPYYIGPLAREKSDFAWMTRKTDDSIRPWNFEDLVDKEKSAEAFIHRMTNNDFYLPEEKVLPKHSLIYEKFTVYNELTKVRYKNEQGETYFFDSNIKQEIFDGVFKEHRKVSKKKLLDFLAKEYEEFRIVDVIGLDKENKAFNASLGTYHDLEKILDKDFLDNPDNESILEDIVQTLTLFEDREMIKKRLENYKDLFTESQLKKLYRRHYTGWGRLSAKLINGIRDKESQKTILDYLIDDGRSNRNFMQLINDDGLSFKSIISKAQAGSHSDNLKEVVGELAGSPAIKKGILQSLKIVDELVKVMGYEPEQIVVEMARENQTTNQGRRNSRQRYKLLDDGVKNLASNILKEYPTDNQALQNERLFLYYLQNGRDMYTGEALDIDNLSQYDIDHIIPQAFIKDDSIDNRVLVSSAKNRGKSDDVPSLEIVKDCKVFWKKLLDAKLMSQRKYDNLTKAERGGLTSDDKARFIQRQLVETRQITKHVARILDERFNNELDSKGRRIRKVKIVTLKSNLVSNFRKEFGFYKIREVNDYHHAHDAYLNAVVAKAILTKYPQLEPEFVYGLYRRKKLSKIVRATRKMFFYSNLMNMFKRVVRLADGSIVVRPVIETGRYMGKTAWDKKKHFATVRKVLSYPQVNIVKKTEIQTGGFSKESILAHGNSDKLIPRKTKDIYLDPKKYGGFDSPIVAYSVLVVADIKKGKAQKLKTVTELLGITIMERSKFEKNPSAFLESKGYLNIRDDKLMILPKYSLFELENGRRRLLASAGELQKGNELALPTQFMKFLYLASRYNESKGKPEEIEKKQEFVNQHVSYFDDILQLINDFSKRVILADANLEKINKLYQDNKENISVDELANNIINLFTFTSLGAPAAFKFFDKIVDRKRYTSTKEVLNSTLIHQSITGLYETRIDLSKLGED

SEQ ID NO: 46 - protein, 1365 aa, Streptococcus agalactiae
MNKPYSIGLDIGTNSVGWSIITDDYKVPAKKMRVLGNTDKEYIKKNLIGALLFDGGNTAADRRLKRTARRRYTRRRNRILYLQEIFAEEMSKVDDSFFHRLEDSFLVEEDKRGSKYPIFATLQEEKDYHEKFSTIYHLRKELADKKEKADLRLIYIALAHIIKFRGHFLIEDDSFDVRNTDISKQYQDFLEIFNITFENNDLLSQNVDVEAILTDKISKSAKKDRILAQYPNQKSTGIFAEFLKLIVGNQADFKKYFNLEDKTPLQFAKDSYDEDLENLLGQIGDEFADLFSAAKKLYDSVLLSGILTVIDLSTKAPLSASMIQRYDEHREDLKQLKQFVKASLPEKYQEIFADSSKDGYAGYIEGKTNQEAFYKYLSKLLTKQEDSENFLEKIKNEDFLRKQRTFDNGSIPHQVHLTELKAIIRRQSEYYPFLKENQDRIEKILTFRIPYYIGPLAREKSDFAWMTRKTDDSIRPWNFEDLVDKEKSAEAFIHRMTNNDFYLPEEKVLPKHSLIYEKFTVYNELTKVRYKNEQGETYFFDSNIKQEIFDGVFKEHRKVSKKKLLDFLAKEYEEFRIVDVIGLDKENKAFNASLGTYHDLEKILDKDFLDNPDNESILEDIVQTLTLFEDREMIKKRLENYKDLFTESQLKKLYRRHYTGWGRLSAKLINGIRDKESQKTILDYLIDDGRSNRNFMQLINDDGLSFKSIISKAQAGSHSDNLKEVVGELAGSPAIKKGILQSLKIVDELVKVMGYEPEQIVVEMARENQTTNQGRRNSRQRYKLLDDGVKNLASNILKEYPTDNQALQNERLFLYYLQNGRDMYTGEALDIDNLSQYDIDHIIPQAFIKDDSIDNRVLVSSAKNRGKSDDVPSLEIVKDCKVFWKKLLDAKLMSQRKYDNLTKAERGGLTSDDKARFIQRQLVETRQITKHVARILDERFNNELDSKGRRIRKVKIVTLKSNLVSNFRKEFGFYKIREVNNYHHAHDAYLNAVVAKAILTKYPQLEPEFVYGDYPKYNSYKTRKATEKLFFYSNIMNFFKTKVTLADGTVVVKDDIEVNNDTGEIVWDKKKHFATVRKVLSYPQNNIVKKTEIQTGGFSKESILAHGNSDKLIPRKTKDIYLDPKKYGGFDSPIVAYSVLVVADIKKGKAQKLKTVTELLGITIMERSRFEKNPSAFLESKGYLNIRADKLIILPKYSLFELENGRRRLLASAGELQKGNELALPTQFMKFLYLASRYNESKGKPEEIEKKQEFVNQHVSYFDDILQLINDFSKRVILADANLEKINKLYQDNKENISVDELANNIINLFTFTSLGAPAAFKFFDKIVDRKRYTSTKEVLNSTLIHQSITGLYETRIDLGKLGED

SEQ ID NO: 47 - protein, 1369 aa, Streptococcus agalactiae
MNKPYSIGLDIGTNSVGWSIITDDYKVPAKKMRVLGNTDKEYIKKNLIGALLFDGGNTAADRRLKRTARRRYTRRRNRILYLQEIFAEEMSKVDDSFFHRLEDSFLVEEDKRGSKYPIFATLQEEKDYHEKFSTIYHLRKELADKKEKADLRLIYIALAHIIKFRGHFLIEDDSFDVRNTDISKQYQDFLEIFNTIFENNDLLSQNVDVEAILTDKISKSAKKDRILAQYPNQKSTGIFAEFLKLIVGNQADFKKYFNLEDKTPLQFAKDSYDEDLENLLGQIGDEFADLFSAAKKLYDSVLLSGILTVIDLSTKAPLSASMIQRYDEHREDLKQLKQFVKASLPEKYQEIFADSSKDGYAGYIEGKTNQEAFYKYLSKLLTKQEDSENFLEKIKNEDFLRKQRTFDNGSIPHQVHLTELKAIIRRQSEYYPFLKENQDRIEKILTFRIPYYIGPLAREKSDFAWMTRKTDDSIRPWNFEDLVDKEKSAEAFIHRMTNNDFYLPEEKVLPKHSLIYEKFTVYNELTKVRYKNEQGETYFFDSNIKQEIFDGVFKEHRKVSKKKLLDFLAKEYEEFRIVDVIGLDKENKAFNASLGTYHDLEKILDKDFLDNPDNESILEDIVQTLTLFEDREMIKKRLENYKDLFTESQLKKLYRRHYTGWGRLSAKLINGIRDKESQKTILDYLIDDGRSNRNFMQLINDDGLSFKSIISKAQAGSHSDNLKEVVGELAGSPAIKKGILQSLKIVDELVKVMGYEPEQIVVEMARENQTTNQGRRNSRQRYKLLDDGVKNLASNILKEYPTDNQALQNERLFLYYLQNGRDMYTGEALDIDNLSQYDIDHIIPQAFIKDDSIDNRVLVSSAKNRGKSDDVPSLEIVKDCKVFWKKLLDAKLMSQRKYDNLTKAERGGLTSDDKARFIQRQLVETRQITKHVARILDERFNNELDSKGRRIRKVKIVTLKSNLVSNFRKEFGFYKIREVNNYHHAHDAYLNAVVAKAILTKYPQLEPEFVYGDYPKYNSYKTRKATEKLFFYSNIMNFFKTKVTLADGTVVVKDDIEVNNDTGEIVWDKKKHFATVRKVLSYPQNNIVKKTEIQTGGFSKESILAHGNSDKLIPRKTKDIYLDPKKYGGFDSPIVAYSVLVVADIKKGKAQKLKTVTELLGITIMERSRFEKNPSAFLESKGYLNIRADKLIILPKYSLFELENGRRRLLASAGETIDRLQKGNELALPTQFMKFLYLASRYNESKGKPEEIEKKQEFVNQHVSYFDDILQLINDFSKRVILADANLEKINKLYQDNKENISVDELANNIINLFTFTSLGAPAAFKFFDKIVDRKRYTSTKEVLNSTLIHQSITGLYETRIDLGKLGED

SEQ ID NO: 48 - protein, 1363 aa, Streptococcus agalactiae
MNKPYSIGLDIGTNSVGWSIITDDYKVPAKKMRVLGNTDKEYIKKNLIGALLFDGGNTAADRRLKRTARRRYTRRRNRILYLQEIFAEEMSKVDDSFFHRLEDSFLVEEDKRGSKYPIFATLQEEKDYHEKFSTIYHLRKELADKKEKADLRLIYIALAHIIKFRGHFLIEDDSFDVRNTDISKQYQDFLEIFNTTFENNDLLSQNVDVEAILTDKISKSAKKDRILAQYPNQKSTGIFAEFLKLIVGNQADFKKYFNLEDKTPLQFAKDSYDEDLENLLGQIGDEFADLFSAAKKLYDSVLLSGILTVIDLSTKAPLSASMIQRYDEHREDLKQLKQFVKASLPEKYQEIFADSSKDGYAGYIEGKTNQEAFYKYLSKLLTKQEDSENFLEKIKNEDFLRKQRTFDNGSIPHQVHLTELKAIIRRQSEYYPFLKENQDRIEKILTFRIPYYIGPLAREKSDFAWMTRKTDDSIRPWNFEDLVDKEKSAEAFIHRMTNNDFYLPEEKVLPKHSLIYEKFTVYNELTKVRYKNEQGETYFFDSNIKQEIFDGVFKEHRKVSKKKLLDFLAKEYEEFRIVDVIGLDKENKAFNASLGTYHDLEKILDKDFLDNPDNESILEDIIQTLTLFEDREMIKKRLENYKDLFTESQLKKLYRRHYTGWGRLSAKLINGIRDKESQKTILDYLIDDGRSNRNFMQLINDDGLSFKSIISKAQAGSHSDNLKEVVGELAGSPAIKKGILQSLKIVDELVKVMGYEPEQIVVEMARENQTTNQGRRNSRQRYKLLDDGVKNLASNILKEYPTDNQALQNERLFLYYLQNGRDMYTGEALDIDNLSQYDIDHIIPQAFIKDDSIDNRVLVSSAKNRGKSDDVPSLEIVKDCKVFWKKLLDAKLMSQRKYDNLTKAERGGLTSKARFIQRQLVETRQITKHVARILDERFNNELDSKGRRIRKVKIVTLKSNLVSNFRKEFGFYKIREVNNYHHAHDAYLNAVVAKAILTKYPQLEPEFVYGDYPKYNSYKTRKATEKLFFYSNIMNFFKTKVTLADGTVVVKDDIEVNNDTGEIVWDKKKHFATVRKVLSYPQNNIVKKTEIQTGGFSKESILAHGNSDKLIPRKTKDIYLDPKKYGGFDSPIVAYSVLVVADIKKGKAQKLKTVTELLGITIMERSRFEKNPSAFLESKGYLNIRADKLIILPKYSLFELENGRRRLLASAGELQKGNELALPTQFMKFLYLASRYNESKGKPEEIEKKQEFVNQHVSYFDDILQLINDFSKRVILADANLEKINKLYQDNKENISVDELANNIINLFTFTSLGAPAAFKFFDKIVDRKRYTSTKEVLNSTLIHQSITGLYETRIDLGKLGED

SEQ ID NO: 49 - protein, 1365 aa, Streptococcus agalactiae
MNKPYSIGLDIGTNSVGWSIITDDYKVPAKKMRVLGNTDKEYIKKNLIGALLFDGGNTAADRRLKRTARRRYTRRRNRILYLQEIFAEEMSKVDDSFFHRLEDSFLVEEDKRGSKYPIFATLQEEKDYHEKFSTIYHLRKELADKKEKADLRLIYIALAHIIKFRGHFLIEDDSFDVRNTDISKQYQDFLEIFNTTFENNDLLSQNVDVEAILTDKISKSAKKDRILAQYPNQKSTGIFAEFLKLIVGNQADFKKYFNLEDKTPLQFAKDSYDEDLENLLGQIGDEFADLFSAAKKLYDSVLLSGILTVIDLSTKAPLSASMIQRYDEHREDLKQLKQFVKASLPEKYQEIFADSSKDGYAGYIEGKTNQEAFYKYLSKLLTKQEDSENFLEKIKNEDFLRKQRTFDNGSIPHQVHLTELKAIIRRQSEYYPFLKENQDRIEKILTFRIPYYIGPLAREKSDFAWMTRKTDDSIRPWNFEDLVDKEKSAEAFIHRMTNNDFYLPEEKVLPKHSLIYEKFTVYNELTKVRYKNEQGETYFFDSNIKQEIFDGVFKEHRKVSKKKLLDFLAKEYEEFRIVDVIGLDKENKAFNASLGTYHDLEKILDKDFLDNPDNESILEDIVQTLTLFEDREMIKKRLENYKDLFTESQLKKLYRRHYTGWGRLSAKLINGIRDKESQKTILDYLIDDGRSNRNFMQLINDDGLSFKSIISKAQAGSHSDNLKEVVGELAGSPAIKKGILQSLKIVDELVKVMGYEPEQIVVEMARENQTTNQGRRNSRQRYKLLDDGVKNLASNILKEYPTDNQALQNERLFLYYLQNGRDMYTGEALDIDDLSQYDIDHIIPQAFIKDDSIDNRVLVSSAKNRGKSDDVPSLEIVKDCKVFWKKLLDAKLMSQRKYDNLTKAERGGLTSDDKARFIQRQLVETRQITKHVARILDERFNNELDSKGRRIRKVKIVTLKSNLVSNFRKEFGFYKIREVNNYHHAHDAYLNAVVAKAILTKYPQLEPEFVYGDYPKYNSYKTRKATEKLFFYSNIMNFFKTKVTLADGTVVVKDDIEVNNDTGEIVWDKKKHFATVRKVLSYPQNNIVKKTEIQTGGFSKESILAHGNSDKLIPRKTKDIYLDPKKYGGFDSPIVAYSVLVVADIKKGKAQKLKTVTELLGITIMERSRFEKNPSAFLESKGYLNIRADKLIILPKYSLFELENGRRRLLASAGELQKGNELALPTQFMKFLYLASRYNESKGKPEEIEKKQEFVNQHVSYFDDILQLINDFSKRVILADANLEKINKLYQDNKENISVDELANNIINLFTFTSLGAPAAFKFFDKIVDRKRYTSTKEVLNSTLIHQSITGLYETRIDLGKLGED

SEQ ID NO: 50 - protein, 1365 aa, Streptococcus agalactiae
MNKPYSIGLDIGTNSVGWSIITDDYKVPAKKMRVLGNTDKEYIKKNLIGALLFDGGNTAADRRLKRTARRRYTRRRNRILYLQEIFAEEMSKVDDSFFHRLEDSFLVEEDKRGSKYPIFATLQEEKDYHEKFSTIYHLRKELADKKEKADLRLIYIALAHIIKFRGHFLIEDDSFDVRNTDISKQYQDFLEIFNTTFENNDLLSQNVDVEAILTDKISKSAKKDRILAQYPNQKSTGIFAEFLKLIVGNQADFKKYFNLEDKTPLQFAKDSYDEDLENLLGQIGDEFADLFSAAKKLYDSVLLSGILTVIDLSTKAPLSASMIQRYDEHREDLKQLKQFVKASLPEKYQEIFADSSKDGYAGYIEGKTNQEAFYKYLSKLLTKQEDSENFLEKIKNEDFLRKQRTFDNGSIPHQVHLTELKAIIRRQSEYYPFLKENQDRIEKILTFRIPYYIGPLAREKSDFAWMTRKTDDSIRPWNFEDLVDKEKSAEAFIHRMTNNDFYLPEEKVLPKHSLIYEKFTVYNELTKVRYKNEQGETYFFDSNIKQEIFDGVFKEHRKVSKKKLLDFLAKEYEEFRIVDVIGLDKENKAFNASLGTYHDLEKILDKDFLDNPDNESILEDIVQTLTLFEDREMIKKRLENYKDLFTESQLKKLYRRHYTGWGRLSAKLINGIRDKESQKTILDYLIDDGRSNRNFMQLINDDGLSFKSIISKAQAGSHSDNLKEVVGELAGSPAIKKGILQSLKIVDELVKVMGYEPEQIVVEMARENQTTNQGRRNSRQRYKLLDDGVKNLASNILKEYPTDNQALQNERLFLYYLQNGRDMYTGEALDIDNLSQYDIDHIIPQAFIKDDSIDNRVLVSSAKNRGKSDDVPSLEIVKDCKVFWKKLLDAKLMSQRKYDNLTKAERGGLTSDDKARFIQRQLVETRQITKHVARILDERFNNELDSKGRRIRKVKIVTLKSNLVSNFRKEFGFYKIREVNNYHHAHDAYLNAVVAKAILTKYPQLEPEFVYGDYPKYNSYKTRKATEKLFFYSNIMNFFKTKVTLADGTVVVKDDIEVNNDTGEIVWDKKKHFATVRKVLSYPQNNIVKKTEIQTGGFSKESILAHGNSDKLIPRKTKDIYLDPKKYGGFDSPIVAYSVLVVADIKKGKAQKLKTVTELLGITIMERSRFEKNPSAFLESKGYLNIRADKLIILPKYSLFELENGRRRLLASAGELQKGNELALPTQFMKFLYLASRYNESKGKPEEIEKKQEFVNQHVSYFDDILQLINDFSKRVILADANLEKINKLYQDNKENISVDELANNIINLFTFTSLGAPAAFKFFDKIVDRKRYTSTKEVLNSTLIHQSITGLYETRIDLGKLGED

SEQ ID NO: 51 - protein, 1365 aa, Streptococcus agalactiae
MNKPYSIGLDIGTNSVGWSIITDDYKVPAKKMRVLGNTDKEYIKKNLIGALLFDGGNTAADRRLKRTARRRYTRRRNRILYLQEIFAEEMSKVDDSFFHRLEDSFLVEEDKRGSKYPIFATLQEEKDYHEKFSTIYHLRKELADKKEKADLRLIYIALAHIIKFRGHFLIEDDSFDVRNTDISKQYQDFLEIFNTTFENNDLLSQNVDVEAILTDKISKSAKKDRILAQYPNQKSTGIFAEFLKLIVGNQADFKKYFNLEDKTPLQFAKDSYDEDLENLLGQIGDEFADLFSAAKKLYDSVLLSGILTVIDLSTKAPLSASMIQRYDEHREDLKQLKQFVKASLPEKYQEIFADSSKDGYAGYIEGKTNQEAFYKYLSKLLTKQEDSENFLEKIKNEDFLRKQRTFDNGSIPHQVHLTELKAIIRRQSEYYPFLKENQDRIEKILTFRIPYYIGPLAREKSDFAWMTRKTDDSIRPWNFEDLVDKEKSAEAFIHRMTNNDFYLPEEKVLPKHSLIYEKFTVYNELTKVRYKNEQGETYFFDSNIKQEIFDGVFKEHRKVSKKKLLDFLAKEYEEFRIVDVIGLDKENKAFNASLGTYHDLEKILDKDFLDNPDNESILEDIVQTLTLFEDREMIKKRLENYKDLFTESQLKKLYRRHYTGWGRLSAKLINGIRDKESQKTILDYLIDDGRSNRNFMQLINDDGLSFKSIISKAQAGSHSDNLKEVVGELAGSPAIKKGILQSLKIVDELVKVMGYEPEQIVVEMARENQTTNQGRRNSRQRYKLLDDGVKNLASNILKEYPTDNQALQNERLFLYYLQNGRDMYTGEALDIDNLSQYDIDHIIPQAFIKDDSIDNRVLVSSAKNRGKSDDVPSLEIVKDCKVFWKKLLDAKLMSQRKYDNLTKAERGGLTSDDKARFIQRQLVETRQITKHVARILDERFNNELDSKGRRIRKVKIVTLKSNLVSNFRKEFGFYKIREVNNYHHAHDAYLNAVVAKAILTKYPQLEPEFVYGDYPKYNSYKTRKATEKLFFYSNIMNFFKTKVTLADGTVVVKDDIEVNNDTGEIVWDKKKHFATVRKVLSYPQNNIVKKTEIQTGGFSKESILAHGNSDKLIPRKTKDIYLDPKKYGGFDSPIVAYSVLVVADIKKGKAQKLKTVTELLGITIMERSRFEKNPSAFLESKGYLNIRADKLIILPKYSLFELENGRRRLLASAGELQKGNELALPTQFMKFLYLASRYNESKGKPEEIEKKQEFVNQHVSYFDDILQLINDFSKRVILADANLEKINKLYQDNKENISVDELANNIINLFTFTSLGAPAAFKFFDKIVDRKRYTSTKEVLNSTLIHQSITGLYETRIDLGKLGGD

SEQ ID NO: 52 - protein, 1365 aa, Streptococcus agalactiae
MNKPYSIGLDIGTNSVGWSIITDDYKVPAKKMRVLGNTDKEYIKKNLIGALLFDGGNTAADRRLKRTARRRYTRRRNRILYLQEIFAEEMSKVDDSFFHRLEDSFLVEEDKRGSKYPIFATLQEEKDYHEKFSTIYHLRKELADKKEKADLRLIYIALAHIIKFRGHFLIEDDSFDVRNTDISKQYQDFLEIFNTTFENNDLLSQNVDVEAILTDKISKSAKKDRILAQYPNQKSTGIFAEFLKLIVGNQADFKKYFNLEDKTPLQFAKDSYDEDLENLLGQIGDEFADLFSAAKKLYDSVLLSGILTVIDLSTKAPLSASMIQRYDEHREDLKQLKQFVKASLPEKYQEIFADSSKDGYAGYIEGKTNQEAFYKYLSKLLTKQEDSENFLEKIKNEDFLRKQRTFDNGSIPHQVHLTELKAIIRRQSEYYPFLKENQDRIEKILTFRIPYYIGPLAREKSDFAWMTRKTDDSIRPWNFEDLVDKEKSAEAFIHRMTNNDFYLPEEKVLPKHSLIYEKFTVYNELTKVRYKNEQGETYFFDSNIKQEIFDGVFKEHRKVSKKKLLDFLAKEYEEFRIVDVIGLDKENKAFNASLGTYHDLEKILDKDFLDNPDNESILEDIVQTLTLFEDREMIKKRLENYKDLFTESQLKKLYRRHYTGWGRLSAKLINGIRDKESQKTILDYLIDDGRSNRNFMQLINDDGLSFKSIISKAQAGSHSDNLKEVVGELAGSPAIKKGILQSLKIVDELVKVMGYEPEQIVVEMARENQTTNQGRRNSRQRYKLLDDGVKNLASNILKEYPTDNQALQNERLFLYYLQNGRDMYTGEALDIDNLSQYDIDHIIPQAFIKDDSIDNRVLVSSAKNRGKSDDVPSLEIVKDCKVFWKKLLDAKLMSQRKYDNLTKAERGGLTSDDKARFIQRQLVETRQITKHVARILDERFNNELDSKGRRIRKVKIVTLKSNLVSNFRKEFGFYKIREVNNYHHAHDAYLNAVVAKAILTKYPQLEPEFVYGDYPKYNSYKTRKATEKLFFYSNIMNFFKTKVTLADGTVVVKDDIEVNNDTGEIVWDKKKHFATVRKVLSYPQNNIVKKTEIQTGGFSKESILAHGNSDKLIPRKTKDIYLDPKKYGGFDSPIVAYSVLVVADIKKGKAQKLKTVTELLGITIMERSRFEKNPSAFLESKGYLNIRDDKLMILPKYSLFELENGRRRLLASAGELQKGNELALPTQFMKFLYLASRYNESKGKPEEIEKKQEFVNQHVSYFDDILQLINDFSKRVILADANLEKINKLYQDNKENISVDELANNIINLFTFTSLGAPAAFKFFDKIVDRKRYTSTKEVLNSTLIHQSITGLYETRIDLGKLGED

SEQ ID NO: 53 - protein, 1365 aa, Streptococcus agalactiae
MNKPYSIGLDIGTNSVGWSIITDDYKVPAKKMRVLGNTDKEYIKKNLIGALLFDGGNTAADRRLKRTARRRYTRRRNRILYLQEIFAEEMSKVDDSFFHRLEDSFLVEEDKRGSKYPIFATLQEEKDYHEKFSTIYHLRKELADKKEKADLRLIYIALAHIIKFRGHFLIEDDSFDVRNTDISKQYQDFLEIFNTTFENNDLLSQNVDVEAILTDKISKSAKKDRILAQYPNQKSTGIFAEFLKLIVGNQADFKKYFNLEDKTPLQFAKDSYDEDLENLLGQIGDEFADLFSAAKKLYDSVLLSGILTVIDLSTKAPLSASMIQRYDEHREDLKQLKQFVKASLPEKYQEIFADSSKDGYAGYIEGKTNQEAFYKYLSKLLTKQEDSENFLEKIKNEDFLRKQRTFDNGSIPHQVHLTELKAIIRRQSEYYPFLKENQDRIEKILTFRIPYYIGPLAREKSDFAWMTRKTDDSIRPWNFEDLVDKEKSAEAFIHRMTNNDFYLPEEKVLPKHSLIYEKFTVYNELTKVRYKNEQGETYFFDSNIKQEIFDGVFKEHRKVSKKKLLDFLAKEYEEFRIVDVIGLDKENKAFNASLGTYHDLEKILDKDFLDNPDNESILEDIVQTLTLFEDREMIKKRLENYKDLFTESQLKKLYRRHYTGWGRLSAKLINGIRDKESQKTILDYLIDDGRSNRNFMQLINDDGLSFKSIISKAQAGSHSDNLKEVVGELAGSPAIKKGILQSLKIVDELVKVVGYEPEQIVVEMARENQTTNQGRRNSRQRYKLLDDGVKNLASNILKEYPTDNQALQNERLFLYYLQNGRDMYTGEALDIDNLSQYDIDHIIPQAFIKDDSIDNRVLVSSAKNRGKSDDVPSLEIVKDCKVFWKKLLDAKLMSQRKYDNLTKAERGGLTSDDKARFIQRQLVETRQITKHVARILDERFNNELDSKGRRIRKVKIVTLKSNLVSNFRKEFGFYKIREVNNYHHAHDAYLNAVVAKAILTKYPQLEPEFVYGDYPKYNSYKTRKATEKLFFYSNIMNFFKTKVTLADGTVVVKDDIEVNNDTGEIVWDKKKHFATVRKVLSYPQNNIVKKTEIQTGGFSKESILAHGNSDKLIPRKTKDIYLDPKKYGGFDSPIVAYSVLVVADIKKGKAQKLKTVTELLGITIMERSRFEKNPSAFLESKGYLNIRADKLIILPKYSLFELENGRRRLLASAGELQKGNELALPTQFMKFLYLASRYNESKGKPEEIEKKQEFVNQHVSYFDDILQLINDFSKRVILADANLEKINKLYQDNKENISVDELANNIINLFTFTSLGAPAAFKFFDKIVDRKRYTSTKEVLNSTLIHQSITGLYETRIDLGKLGED

SEQ ID NO: 54 - protein, 1365 aa, Streptococcus agalactiae
MNKPYSIGLDIGTNSVGWSIITDDYKVPAKKMRVLGNTDKEYIKKNLIGALLFDGGNTAADRRLKRTARRRYTRRRNRILYLQEIFAEEMSKVDDSFFHRLEDSFLVEEDKRGSKYPIFATLQEEKDYHEKFSTIYHLRKELADKKEKADLRLIYIALAHIIKFRGHFLIEDDSFDVRNTDISKQYQDFLEIFNTTFENNDLLSQNVDVEAILTDKISKSAKKDRILAQYPNQKSTGIFAEFLKLIVGNQADFKKYFNLEDKTPLQFAKDSYDEDLENLLRQIGDEFADLFSAAKKLYDSVLLSGILTVIDLSTKAPLSASMIQRYDEHREDLKQLKQFVKASLPEKYQEIFADSSKDGYAGYIEGKTNQEAFYKYLSKLLTKQEDSENFLEKIKNEDFLRKQRTFDNGSIPHQVHLTELKAIIRRQSEYYPFLKENQDRIEKILTFRIPYYIGPLAREKSDFAWMTRKTDDSIRPWNFEDLVDKEKSAEAFIHRMTNNDFYLPEEKVLPKHSLIYEKFTVYNELTKVRYKNEQGETYFFDSNIKQEIFDGVFKEHRKVSKKKLLDFLAKEYEEFRIVDVIGLDKENKAFNASLGTYHDLEKILDKDFLDNPDNESILEDIVQTLTLFEDREMIKKRLENYKDLFTESQLKKLYRRHYTGWGRLSAKLINGIRDKESQKTILDYLIDDGRSNRNFMQLINDDGLSFKSIISKAQAGSHSDNLKEVVGELAGSPAIKKGILQSLKIVDELVKVMGYEPEQIVVEMARENQTTNQGRRNSRQRYKLLDDGVKNLASNILKEYPTDNQALQNERLFLYYLQNGRDMYTGEALDIDNLSQYDIDHIIPQAFIKDDSIDNRVLVSSAKNRGKSDDVPSLEIVKDCKVFWKKLLDAKLMSQRKYDNLTKAERGGLTSDDKARFIQRQLVETRQITKHVARILDERFNNELDSKGRRIRKVKIVTLKSNLVSNFRKEFGFYKIREVNNYHHAHDAYLNAVVAKAILTKYPQLEPEFVYGDYPKYNSYKTRKATEKLFFYSNIMNFFKTKVTLADGTVVVKDDIEVNNDTGEIVWDKKKHFATVRKVLSYPQNNIVKKTEIQTGGFSKESILAHGNSDKLIPRKTKDIYLDPKKYGGFDSPIVAYSVLVVADIKKGKAQKLKTVTELLGITIMERSRFEKNPSAFLESKGYLNIRADKLIILPKYSLFELENGRRRLLASAGELQKGNELALPTQFMKFLYLASRYNESKGKPEEIEKKQEFVNQHVSYFDDILQLINDFSKRVILADANLEKINKLYQDNKENISVDELANNIINLFTFTSLGAPAAFKFFDKIVDRKRYTSTKEVLNSTLIHQSITGLYETRIDLGKLGED

SEQ ID NO: 55 - protein, 1365 aa, Streptococcus agalactiae
MNKPYSIGLDIGTNSVGWSIITDDYKVPAKKMRVLGNTDKEYIKKNLIGALLFDGGNTAADRRLKRTARRRYTRRRNRILYLQEIFAEEMSKVDDSFFHRLEDSFLVEEDKRGSKYPIFATMQEEKDYHEKFPTIYHLRKELADKKEKADLRLVYLALAHIIKFRGHFLIEDDRFDVRNTDIQKQYQAFLEIFDTSFENNHLLSQNVDVEAILTDKISKSAKKDRILAQYPNQKSTGIFAEFLKLIVGNQADFKKHFNLEDKTPLQFAKDSYDEDLENLLGQIGDEFADLFSAAKKLYDSVLLSGILTVTDLSTKAPLSAYMIQRYDEHREDLKQLKQFVKASLPEKYQEIFADSSKDGYAGYIEGKTNQEAFYKYLSKLLTKQEDSEYFLEKIKNEDFLRKQRTFDNGSIPHQVHLTELKAIIRRQSEYYPFLKENQDKIEKILTFRIPYYVGPLARGNSDFAWMTRKTDDSIRPWNFEDLVDKEKSAEAFIHRMTNNDLYLPEEKVLPKHSLIYEKFTVYNELTKVRYKNEQGETYFFDSNVKQEIFDGVFKEHRKVSKKQLLDFLAKEFEEFRIVDVTGLDKENKAFNASLGTYHDLKKILDKDFLDNPDNESILEDIVQTITLFEDREMIKKRLENYKDLFTESQLKKLYRRHYTGWGRLSAKLINGIRDRESQKTILDYLISDGRANRNFMQLINDDGLSFKSIISKAQSGSHSDNLKEVVGELAGSPAIKKGILQSLKIVDELVKVMGYEPEQIVVEMARENQTTNQGRRNSRQRYKLLEDGVKNLASDILKEYPTDNQALQNERLFLYYLQNGRDMYTGEALDIDNLSQYDIDHIVPQAFIKDDSIDNRVLVSSAKNRGKSDDVPSIDIVKARKAFWKKLLDAKLISQRKYDNLTKAERGGLTPDDKAGFIQRQLVETRQITKHVARILDERFNNKVDDNNKPIRKVKIVTLKSNLVSNFRKEFGFYKIREVNNYHHAHDAYLNAVVAKAILTKYPQLEPEFVYGDYPKYNSYKTRKATEKLFFYSNIMNFFKTKVTLADETVVVKDDIEVNNETGEIAWDKKKHFATVRKVLSYPQVNIVKKTEVQTGGFSKESILAHSNSDKLIPRKTKDIYLDPKKYGGFDSPIVAYSVLVLADIKKGKAQKLKTVKELIGITIMERERFEKNPSAFLESKGYLNIRTDKLIILPKYSLFELENGRRRLLASAGELQKGNELALPTQYMKFLYLASRYNESKGKPEEIEKKQEFVNQHISYFDDILQLINDFSKRVILADANLEKINKLYSDNKDNTPVDELAKNIINLFTFTSLGAPAAFKFFDKSVDRKRYTSTKEVLDSTLIHQSITGLYETRIDLGKLGED

SEQ ID NO: 56 - protein, 1365 aa, Streptococcus agalactiae
MNKPYSIGLDIGTNSVGWSIITDDYKVPAKKMRVLGNTDKEYIKKNLIGALLFDGGNTAADRRLKRTARRRYTRRRNRILYLQEIFAEEMSKVDDSFFHRLEDSFLVEEDKRGSKYPIFATMQEEKYYHEKFPTIYHLRKELADKKEKADLRLIYLALAHIIKFRGHFLIEDDRFDVRNTDIQKQYQAFLEIFDTTFENNDLLSQNVDVEAILTDKISKSAKKDRILARYPNQKSTGIFAEFLKLIVGNQADFKKHFNLEDKTPLQFAKDSYDEDLENLLGQIGDEFADLFSAAKKLYDSVLLSGILTVTDLSTKAPLSASMIQHYDEHREDLKQLKQFVKASLPEKYQEIFADSSKDGYAGYIEGKTNQEAFYKYLSKLLTKQEGSEYLLEKIKNEDFLRKQRTFDNGSIPHQVHLTELRAIIRRQSEYYPFLKENLDRIEKILTFRIPYYVGPLAREKSDFAWMTRKTDDSIRPWNFEDLVDKEKSAEAFIHRMTNNDLYLPEEKVLPKHSLIYEKFTVYNELTKVRFLAEGFKDFQFLNRKQKETIFNSLFKEKRKVTEKDIISFLNKVDGYEGIAIKGIEKQFNASLSTYHDLKKILGKDFLDNTDNELILEDIVQTLTLFEDREMIRKRLDIYKDFFTESQLKKLYRRHYTGWGRLSAKLINGIRNKENQKTILDYLIDDGSANRNFMQLIKDAGLSFKPIIDKARTGSHSDNLKEVVGELAGSPAIKKGILQSLKIVDELVKVMGYEPEQIVVEMARENQTTAKGLSRSRQRLTTLRESLANLKSEKKPKYVKDQVENHHLSDDRLFLYYLQNGKDMYTDDELDIDNLSQYDIDHIIPQAFIKDDSIDNRVLVSSAKNRGKSDDVPSVEIVKDCKVFWKKLLDAKLMSQRKYDNLTKAERGGLTSDDKARFIQRQLVETRQITKHVARILDERFNNELDSKGRRIRKVKIVTLKSNLVSNFRKEFGFYKIREVNNYHHAHDAYLNAVVAKAILTKYPQLEPEFVYGDYPKYNSYKTRKATEKLFFYSNIMNFFKTKVTLADGTVVVKDDIEVNNDTGEIVWDKKKHFATVRKVLSYPQVNIVKKTEIQTGGFSKESILAHGNSDKLIPRKTKDIYLDPKKYGGFDSPIVAYSVLVVADIKKGKAQKLKTVTELLGITIMERSRFEKNPSAFLESKGYLNIRDDKLMILPKYSLFELENGRRRLLASAGELQKGNELALPTQFMKFLYLASRYNELKGKPEEIEQKQEFVVQHVSYFDDILQIINDFSNRVILADANLEKINKLYQDNKENIPVDELANNIINLFTFTSLGAPAAFKFFDKIVDRKRYTSTKEVLNSTLIHQSITGLYETRIDLGKLGED

SEQ ID NO: 57 - protein, 1365 aa, Streptococcus agalactiae
MNKPYSIGLDIGTNSVGWSIITDDYKVPAKKMRVLGNTDKEYIKKNLIGALLFDGGNTAADRRLKRTARRRYTRRRNRILYLQEIFAEEMSKVDDSFFHRLEDSFLVEEDKRGSKYPIFATMQEEKYYHEKFPTIYHLRKELADKKEKADLRLIYLALAHIIKFRGHFLIEDDRFDVRNTDIQKQYQAFLEIFDTTFENNDLLSQNVDVEAILTDKISKSAKKDRILARYPNQKSTGIFAEFLKLIVGNQADFKKHFNLEDKTPLQFAKDSYDEDLENLLGQIGDEFADLFSAAKKLYDSVLLSGILTVTDLSTKAPLSASMIQRYDEHREDLKQLKQFVKASLPEKYQEIFADSSKDGYAGYIEGKTNQEAFYKYLSKLLTKQEGSEYLLEKIKNEDFLRKQRTFDNGSIPHQVHLTELRAIIRRQSEYYPFLKENLDRIEKILTFRIPYYVGPLAREKSDFAWMTRKTDDSIRPWNFEDLVDKEKSAEAFIHRMTNNDLYLPEEKVLPKHSLIYEKFTVYNELTKVRFLAEGFKDFQFLNRKQKETIFNSLFKEKRKVTEKDIISFLNKVDGYEGIAIKGIEKQFNASLSTYHDLKKILGKDFLDNTDNELILEDIVQTLTLFEDREMIRKRLDIYKDFFTESQLKKLYRRHYTGWERLSAKLINGIRNKENQKTILDYLIDDGSANRNFMQLIKDAGLSFKPIIDKARTGSHLDNLKEVVGELAGSPAIKKGILQSLKIVDELVKVMGYEPEQIVVEMARENQTTAKGLSRSRQRLTTLRESLANLKSEKKPKYVKDQVENHHLSDDRLFLYYLQNGKDMYTDDELDIDNLSQYDIDHIIPQAFIKDDSIDNRVLVSSAKNRGKSDDVPSLEIVKDCKVFWKKLLDAKLMSQRKYDNLTKAERGGLTSDDKARFIQRQLVETRQITKHVARILDERFNNELDSKGRRIRKVKIVTLKSNLVSNFRKEFGFYKIREVNNYHHAHDAYLNAVVAKAILTKYPQLEPEFVYGDYPKYNSYKTRKATEKLFFYSNIMNFFKTKVTLADGTVVVKDDIEVNNDTGEIVWDKKKHFATVRKVLSYPQVNIVKKTEVQTGGFSKESILAHGNSDKLIPRKTKDIYLDPKKYGGFDSPIVAYSVLVVADIKKGKAQKLKTVTELLGITIMERSRFEKNPSAFLESKGYLNIRTDKLIILPKYSLFELENGRRRLLASAGELQKGNELALPTQYMKFLYLASRYNELKGKPEEIEQKQEFVVQHVSYFDDILQIINDFSNRVILADANLEKINKLYQDNKENIPVDELANNIINLFTFTSLGAPAAFKFFDKIVDRKRYTSTKEVLNSTLIHQSITGLYETRIDLGKLGEG

SEQ ID NO: 58 - protein, 1365 aa, Streptococcus agalactiae
MNKPYSIGLDIGTNSVGWSIITDDYKVPAKKMRVLGNTDKEYIKKNLIGALLFDGGNTAADRRLKRTARRRYTRRRNRILYLQEIFAEEMSKVDDSFFHRLEDSFLVEEDKRGSKYPIFATMQEEKYYHEKFPTIYHLRKELADKKEKADLRLIYLALAHIIKFRGHFLIEDDRFDVRNTDIQKQYQAFLEIFDTTFENNDLLSQNVDVEAILTDKISKSAKKDRILARYPNQKSTGIFAEFLKLIVGNQADFKKHFNLEDKTPLQFAKDSYDEDLENLLGQIGDEFADLFSAAKKLYDSVLLSGILTVTDLSTKAPLSASMIQRYDEHREDLKQLKQFVKASLPEKYQEIFADSSKDGYAGYIEGKTNQEAFYKYLSKLLTKQEGSEYLLEKIKNEDFLRKQRTFDNGSIPHQVHLTELRAIIRRQSEYYPFLKENLDRIEKILTFRIPYYVGPLAREKSDFAWMTRKTDDSIRPWNFEDLVDKEKSAEAFIHRMTNNDLYLPEEKVLPKHSLIYEKFTVYNELTKVRFLAEGFKDFQFLNRKQKETIFNSLFKEKRKVTEKDIISFLNKVDGYEGIAIKGIEKQFNASLSTYHDLKKILGKDFLDNTDNELILEDIVQTLTLFEDREMIRKRLDIYKDFFTESQLKKLYRRHYTGWGRLSAKLINGIRNKENQKTILDYLIDDGSANRNFMQLIKDAGLSFKPIIDKARTGSHLDNLKEVVGELAGSPAIKKGILQSLKIVDELVKVMGYEPEQIVVEMARENQTTAKGLSRSRQRLTTLRESLANLKSEKKPKYVKDQVENHHLSDDRLFLYYLQNGKDMYTDDELDIDNLSQYDIDHIIPQAFIKDDSIDNRVLVSSAKNRGKSDDVPSLEIVKDCKVFWKKLLDAKLMSQRKYDNLTKAERGGLTSDDKARFIQRQLVETRQITKHVARILDERFNNELDSKGRRIRKVKIVTLKSNLVSNFRKEFGFYKIREVNNYHHAHDAYLNAVVAKAILTKYPQLEPEFVYGDYPKYNSYKTRKATEKLFFYSNIMNFFKTKVTLADGTVVVKDDIEVNNDTGEIVWDKKKHFATVRKVLSYPQVNIVKKTEVQTGGFSKESILAHGNSDKLIPRKTKDIYLDPKKYGGFDSPIVAYSVLVVADIKKGKAQKLKTVTELLGITIMERSRFEKNPSAFLESKGYLNIRTDKLIILPKYSLFELENGRRRLLASAGELQKGNELALPTQYMKFLYLASRYNELKGKPEEIEQKQEFVVQHVSYFDDILQIINDFSNRVILADANLEKINKLYQDNKENIPVDELANNIINLFTFTSLGAPAAFKFFDKIVDRKRYTSTKEVLNSTLIHQSITGLYETRIDLGKLGEG

SEQ ID NO: 59 - protein, 1365 aa, Streptococcus agalactiae
MNKPYSIGLDIGTNSVGWSIITDDYKVPAKKMRVLGNTDKEYIKKNLIGALLFDGGNTAADRRLKRTARRRYTRRRNRILYLQEIFAEEMSKVDDSFFHRLEDSFLVEEDKRGSKYPIFATMQEEKYYHEKFPTIYHLRKELADKKEKADLRLIYLALAHIIKFRGHFLIEDDRFDVRNTDIQKQYQAFLEIFDTTFENNDLLSQNVDVEAILTDKISKSAKKDRILARYPNQKSTGIFAEFLKLIVGNQADFKKHFNLEDKTPLQFAKDSYDEDLENLLGQIGDEFADLFSAAKKLYDSVLLSGILTVTDLSTKAPLSASMIQRYDEHREDLKQLKQFVKASLPEKYQEIFADSSKDGYAGYIEGKTNQEAFYKYLSKLLTKQEGSEYLLEKIKNEDFLRKQRTFDNGSIPHQVHLTELRAIIRRQSEYYPFLKENLDRIEKILTFRIPYYVGPLAREKSDFAWMTRKTDDSIRPWNFEDLVDKEKSAEAFIHRMTNNDLYLPEEKVLPKHSLIYEKFTVYNELTKVRFLAEGFKDFQFLNRKQKETIFNSLFKEKRKVTEKDIISFLNKVDGYEGIAIKGIEKQFNASLSTYHDLKKILGKDFLDNTDNELILEDIVQTLTLFEDREMIRKRLDIYKDFFTESQLKKLYRRHYTGWGRLSAKLINGIRNKENQKTILDYLIDDGSANRNFMQLIKDAGLSFKPIIDKARTGSHSDNLKEVVGELAGSPAIKKGILQSLKIVDELVKVMGYEPEQIVVEMARENQTTAKGLSRLRQRLTTLRESLANLKSEKKPKYVKDQVENHHLSDDRLFLYYLQNGKDMYTDDELDIDNLSQYDIDHIIPQAFIKDDSIDNRVLVSSAKNRGKSDDVPSVEIVKDCKVFWKKLLDAKLMSQRKYDNLTKAERGGLTSDDKARFIQRQLVETRQITKHVARILDERFNNELDSKGRRIRKVKIVTLKSNLVSNFRKEFGFYKIREVNNYHHAHDAYLNAVVAKAILTKYPQLEPEFVYGDYPKYNSYKTRKATEKLFFYSNIMNFFKTKVTLADGTVVVKDDIEVNNDTGEIVWDKKKHFATVRKVLSYPQVNIVKKTEIQTGGFSKESILAHGNSDKLIPRKTKDIYLDPKKYGGFDSPIVAYSVLVVADIKKGKAQKLKTVTELLGITIMERSRFEKNPSAFLESKGYLNIRDDKLMILPKYSLFELENGRRRLLASADELQKGNELALPTQFMKFLYLASRYNELKGKPEEIEQKQEFVVQHVSYFDDILQIINDFSNRVILADANLEKINKLYQDNKENIPVDELANNIINLFTFTSLGAPAAFKFFDKIVDRKRYTSTKEVLNSTLIHQSITGLYETRIDLGKLGED

SEQ ID NO: 60 - protein, 1365 aa, Streptococcus agalactiae
MNKPYSIGLDIGTNSVGWSIITDDYKVPAKKMRVLGNTDKEYIKKNLIGALLFDGGNTAADRRLKRTARRRYTRRRNRILYLQEIFAEEMSKVDDSFFHRLEDSFLVEEDKRGSKYPIFATMQEEKYYHEKFPTIYHLRKELADKKEKADLRLIYLALAHIIKFRGHFLIEDDRFDVRNTDIQKQYQAFLEIFDTTFENNDLLSQNVDVEAILTDKISKSAKKDRILARYPNQKSTGIFAEFLKLIVGNQADFKKHFNLEDKTPLQFAKDSYDEDLENLLGQIGDEFADLFSAAKKLYDSVLLSGILTVTDLSTKAPLSASMIQRYDEHREDLKQLKQFVKASLPEKYQEIFADSSKDGYAGYIEGKTNQEAFYKYLSKLLTKQEGSEYLLEKIKNEDFLRKQRTFDNGSIPHQVHLTELRAIIRRQSEYYPFLKENLDRIEKILTFRIPYYVGPLAREKSDFAWMTRKTDDSIRPWNFEDLVDKEKSAEAFIHRMTNNDLYLPEEKVLPKHSLIYEKFTVYNELTKVRFLAEGFKDFQFLNRKQKETIFNSLFKEKRKVTEKDIISFLNKVDGYEGIAIKGIEKQFNASLSTYHDLKKILGKDFLDNTDNELILEDIVQTLTLFEDREMIRKRLDIYKDFFTESQLKKLYRRHYTGWGRLSAKLINGIRNKENQKTILDYLIDDGSANRNFMQLIKDAGLSFKPIIDKARTGSHSDNLKEVVGELAGSPAIKKGILQSLKIVDELVKVMGYEPEQIVVEMARENQTTAKGLSRSRQRLTTLRESLANLKSEKKPKYVKDQVENHHLSDDRLFLYYLQNGKDMYTDDELDIDNLSQYDIDHIIPQAFIKDDSIDNRVLVSSAKNRGKSDDVPSVEIVKDCKVFWKKLLDAKLMSQRKYDNLTKAERGGLTSDDKARFIQRQLVETRQITKHVARILDERFNNELDSKGRRIRKVKIVTLKSNLVSNFRKEFGFYKIREVNNYHHAHDAYLNAVVAKAILTKYPQLEPEFVYGDYPKYNSYKTRKATEKLFFYSNIMNFFKTKVTLADGTVVVKDDIEVNNDTGEIVWDKKKHFATVRKVLSYPQVNIVKKTEIQTGGFSKESILAHGNSDKLIPRKTKDIYLDPKKYGGFDSPIVAYSVLVVADIKKGKAQKLKTVTELLGITIMERSRFEKNPSAFLESKGYLNIRDDKLMILPKYSLFELENGRRRLLASAGELQKGNELALPTQFMKFLYLASRYNELKGKPEEIEQKQEFVVQHVSYFDDILQIINDFSNRVILADANLEKINKLYQDNKENIPVDELANNIINLFTFTSLGAPAAFKFFDKIVDRKRYTSTKEVLNSTLIHQSITGLYETRIDLGKLGED

SEQ ID NO: 61 - protein, 1365 aa, Streptococcus agalactiae
MNKPYSIGLDIGTNSVGWSIITDDYKVPAKKMRVLGNTDKEYIKKNLIGALLFDGGNTAADRRLKRTARRRYTRRRNRILYLQEIFAEEMSKVDDSFFHRLEDSFLVEEDKRGSKYPIFATMQEEKYYHEKFPTIYHLRKELADKKEKADLRLIYLALAHIIKFRGHFLIEDDRFDVRNTDIQKQYQAFLEIFDTTFENNDLLSQNVDVEAILTDKISKSAKKDRILARYPNQKSTGIFAEFLKLIVGNQADFKKHFNLEDKTPLQFAKDSYDEDLENLLGQIGDEFADLFSAAKKLYDSVLLSGILTVTDLSTKAPLSASMIQRYDEHREDLKQLKQFVKASLPEKYQEIFADSSKDGYAGYIEGKTNQEAFYKYLSKLLTKQEGSEYLLEKIKNEDFLRKQRTFDNGSIPHQVHLTELRAIIRRQSEYYPFLKENLDRIEKILTFRIPYYVGPLAREKSDFAWMTRKTDDSIRPWNFEDLVDKEKSAEAFIHRMTNNDLYLPEEKVLPKHSLIYEKFTVYNELTKVRFLAEGFKDFQFLNRKQKETIFNSLFKEKRKVTEKDIISFLNKVDGYEGIAIKGIEKQFNASLSTYHDLKKILGKDFLDNTDNELILEDIVQTLTLFEDREMIRKRLDIYKDFFTESQLKKLYRRHYTGWGRLSAKLINGIRNKENQKTILDYLIDDGSANRNFMQLIKDAGLSFKPIIDKARTGSHSDNLKEVVGELAGSPAIKKGILQSLKIVDELVKVMGYEPEQIVVEMARENQTTAKGLSRSRQRLTTLRESLANLKSEKKPKYVKDQVENHHLSDDRLFLYYLQNGKDMYTDDELDIDNLSQYDIDHIIPQAFIKDDSIDNRVLVSSAKNRGKSDDVPSVEIVKDCKVFWKKLLDAKLMSQRKYDNLTKAERGGLTSDDKARFIQRQLVETRQITKHVARILDERFNNELDSKGRRIRKVKIVTLKSNLVSNFRKEFGFYKIREVNNYHHAHDAYLNAVVAKAILTKYPQLEPEFVYGDYPKYNSYKTRKATEKLFFYSNIMNFFKTKVTLADGTVVVKDDIEVNNDTGEIVWDKKKHFATVRKVLSYPQVNIVKKTEIQTGGFSKESILAHGNSDKLIPRKTKDIYLDPKKYGGFDSPKVAYSVLVVADIKKGKAQKLKTVTELLGITIMERSRFEKNPSAFLESKGYLNIRDDKLMILPKYSLFELENGRRRLLASAGELQKGNELALPTQFMKFLYLASRYNELKGKPEEIEQKQEFVVQHVSYFDDILQIINDFSNRVILADANLEKINKLYQDNKENIPVDELANNIINLFTFTSLGAPAAFKFFDKIVDRKRYTSTKEVLNSTLIHKSITGLYETRIDLGKLGED

SEQ ID NO: 62 - protein, 1365 aa, Streptococcus agalactiae
MNKPYSIGLDIGTNSVGWSIITDDYKVPAKKMRVLGNTDKEYIKKNLIGALLFDGGNTAADRRLKRTARRRYTRRRNRILYLQEIFAEEMSKVDDSFFHRLEDSFLVEEDKRGSKYPIFATMQEEKYYHEKFPTIYHLRKELADKKEKADLRLIYLALAHIIKFRGHFLIEDDRFDVRNTDIQKQYQAFLEIFDTTFENNDLLSQNVDVEAILTDKISKSAKKDRILARYPNQKSTGIFAEFLKLIVGNQADFKKHFNLEDKTPLQFAKDSYDEDLENLLGQIGDEFADLFSAAKKLYDSVLLSGILTVTDLSTKAPLSASMIQRYDEHREDLKQLKQFVKASLPEKYQEIFADSSKDGYAGYIEGKTNQEAFYKYLSKLLTKQEGSEYLLEKIKNEDFLRKQRTFDNGSIPHQVHLTELRAIIRRQSEYYPLLKENLDRIEKILTFRIPYYVGPLAREKSDFAWMTRKTDDSIRPWNFEDLVDKEKSAEAFIHRMTNNDLYLPEEKVLPKHSLIYEKFTVYNELTKVRFLAEGFKDFQFLNRKQKETIFNSLFKEKRKVTEKDIISFLNKVDGYEGIAIKGIEKQFNASLSTYHDLKKILGKDFLDNTDNELILEDIVQTLTLFEDREMIRKRLDIYKDFFTESQLKKLYRRHYTGWGRLSAKLINGIRNKENQKTILDYLIDDGSANRNFMQLIKDAGLSFKPIIDKARTGSHSDNLKEVVGELAGSPAIKKGILQSLKIVDELVKVMGYEPEQIVVEMARENQTTAKGLSRSRQRLTTLRESLANLKSEKKPKYVKDQVENHHLSDDRLFLYYLQNGKDMYTDDELDIDNLSQYDIDHIIPQAFIKDDSIDNRVLVSSAKNRGKSDDVPSVEIVKDCKVFWKKLLDAKLMSQRKYDNLTKAERGGLTSDDKARFIQRQLVETRQITKHVARILDERFNNELDSKGRRIRKVKIVTLKSNLVSNFRKEFGFYKIREVNNYHHAHDAYLNAVVAKAILTKYPQLEPEFVYGDYPKYNSYKTRKATEKLFFYSNIMNFFKTKVTLADGTVVVKDDIEVNNDTGEIVWDKKKHFATVRKVLSYPQVNIVKKTEIQTGGFSKESILAHGNSDKLIPRKTKDIYLDPKKYGGFDSPIVAYSVLVVADIKKGKAQKLKTVTELLGITIMERSRFEKNPSAFLESKGYLDIRDDKLMILPKYSLFELENGRRRLLASAGELQKGNELALPTQFMKFLYLASRYNELKGKPEEIEQKQEFVVQHVSYFDDILQIINDFSNRVILADANLEKINKLYQDNKENIPVDELANNIINLFTFTSLGAPAAFKFFDKIVDRKRYTSTKEVLNSTLIHQSITGLYETRIDLGKLGED

SEQ ID NO: 63 - protein, 1365 aa, Streptococcus agalactiae
  SITE 117: note = misc_feature - Xaa can be any naturally occurring amino acid
MNKPYSIGLDIGTNSVGWSIITDDYKVPAKKMRVLGNTDKEYIKKNLIGALLFDGGNTAADRRLKRTARRRYTRRRNRILYLQEIFAEEMSKVDDSFFHRLEDSFLVEEDKRGSKYXIFATLQEEKDYHEKFSTIYHLRKELADKKEKADLRLIYIALAHIIKFRGHFLIEDDSFDVRNTDISKQYQDFLEIFNTTFENNDLLSQNVDVEAILTDKISKSAKKDRILAQYPNQKSTGIFAEFLKLIVGNQADFKKYFNLEDKTPLQFAKDSYDEDLENLLGQIGDEFADLFSAAKKLYDSVLLSGILTVIDLSTKAPLSASMIQRYDEHREDLKQLKQFVKASLPEKYQEIFADSSKDGYAGYIEGKTNQEAFYKYLSKLLTKQEDSENFLEKIKNEDFLRKQRTFDNGSIPHQVHLTELKAIIRRQSEYYPFLKENQDRIEKILTFRIPYYIGPLAREKSDFAWMTRKTDDSIRPWNFEDLVDKEKSAEAFIHRMTNNDFYLPEEKVLPKHSLIYEKFTVYNELTKVRYKNEQGETYFFDSNIKQEIFDGVFKEHRKVSKKKLLDFLAKEYEEFRIVDVIGLDKENKAFNASLGTYHDLEKILDKDFLDNPDNESILEDIVQTLTLFEDREMIKKRLENYKDLFTESQLKKLYRRHYTGWGRLSAKLINGIRDKESQKTILDYLIDDGRSNRNFMQLINDDGLSFKSIISKAQAGSHSDNLKEVVGELAGSPAIKKGILQSLKIVDELVKVMGYEPEQIVVEMARENQTTNQGRRNSRQRYKLLDDGVKNLASNILKEYPTDNQALQNERLFLYYLQNGRDMYTGEALDIDNLSQYDIDHIIPQAFIKDDSIDNRVLVSSAKNRGKSDDVPSLEIVKDCKVFWKKLLDAKLMSQRKYDNLTKAERGGLTSDDKARFIQRQLVETRQITKHVARILDERFNNELDSKGRRIRKVKIVTLKSNLVSNFRKEFGFYKIREVNNYHHAHDAYLNAVVAKAILTKYPQLEPEFVYGDYPKYNSYKTRKATEKLFFYSNIMNFFKTKVTLADGTVVVKDDIEVNNDTGEIVWDKKKHFATVRKVLSYPQNNIVKKTEIQTGGFSKESILAHGNSDKLIPRKTKDIYLDPKKYGGFDSPIVAYSVLVVADIKKGKAQKLKTVTELLGITIMERSRFEKNPSAFLESKGYLNIRADKLIILPKYSLFELENGRRRLLASAGELQKGNELALPTQFMKFLYLASRYNESKGKPEEIEKKQEFVNQHVSYFDDILQLINDFSKRVILADANLEKINKLYQDNKENISVDELANNIINLFTFTSLGAPAAFKFFDKIVDRKRYTSTKEVLNSTLIHQSITGLYETRIDLGKLGED

SEQ ID NO: 64 - protein, 1365 aa, Streptococcus agalactiae
MNKPYSIGLDIGTNSVGWSIITDDYKVPAKKMRVLGNTDKEYIKKNLIGALLFDGGNTAADRRLKRTSRRRYTRRRNRILYLQEIFAEEMSKVDDSFFHRLEDSFLVEEDKRGSKYPIFATLQEEKDYHEKFSTIYHLRKELADKKEKADLRLIYIALAHIIKFRGHFLIEDDSFDVRNTDISKQYQDFLEIFNTTFENNDLLSQNVDVEAILTDKISKSAKKDRILAQYPNQKSTGIFAEFLKLIVGNQADFKKYFNLEDKTPLQFAKDSYDEDLENLLGQIGDEFADLFSAAKKLYDSVLLSGILTVIDLSTKAPLSASMIQRYDEHREDLKQLKQFVKASLPEKYQEIFADSSKDGYAGYIEGKTNQEAFYKYLSKLLTKQEDSENFLEKIKNEDFLRKQRTFDNGSIPHQVHLTELKAIIRRQSEYYPFLKENQDRIEKILTFRIPYYIGPLAREKSDFAWMTRKTDDSIRPWNFEDLVDKEKSAEAFIHRMTNNDFYLPEEKVLPKHSLIYEKFTVYNELTKVRYKNEQGETYFFDSNIKQEIFDGVFKEHRKVSKKKLLDFLAKEYEEFRIVDVIGLDKENKAFNASLGTYHDLEKILDKDFLDNPDNESILEDIVQTLTLFEDREMIKKRLENYKDLFTESQLKKLYRRHYTGWGRLSAKLINGIRDKESQKTILDYLIDDGRSNRNFMQLINDDGLSFKSIISKAQAGSHSDNLKEVVGELAGSPAIKKGILQSLKIVDELVKVMGYEPEQIVVEMARENQTTNQGRRNSRQRYKLLDDGVKNLASNILKEYPTDNQALQNERLFLYYLQNGRDMYTGEALDIDNLSQYDIDHIIPQAFIKDDSIDNRVLVSSAKNRGKSDDVPSLEIVKDCKVFWKKLLDAKLMSQRKYDNLTKAERGGLTSDDKARFIQRQLVETRQITKHVARILDERFNNELDSKGRRIRKVKIVTLKSNLVSNFRKEFGFYKIREVNNYHHAHDAYLNAVVAKAILTKYPQLEPEFVYGDYPKYNSYKTRKATEKLFFYSNIMNFFKTKVTLADGTVVVKDDIEVNNDTGEIVWDKKKHFATVRKVLSYPQNNIVKKTEIQTGGFSKESILAHGNSDKLIPRKTKDIYLDPKKYGGFDSPIVAYSVLVVADIKKGKAQKLKTVTELLGITIMERSRFEKNPSAFLESKGYLNIRADKLIILPKYSLFELENGRRRLLASAGELQKGNELALPTQFMKFLYLASRYNESKGKPEEIEKKQEFVNQHVSYFDDILQLINDFSKRVILADANLEKINKLYQDNKENISVDELANNIINLFTFTSLGAPAAFKFFDKIVDRKRYTSTKEVLNSTLIHQSITGLYETRIDLGKLGED

SEQ ID NO: 65 - protein, 1365 aa, Streptococcus agalactiae
MNKPYSIGLDIGTNSVGYSVVTDDYKVPAKKMRVLGNTDKEYIKKNLIGALLFDGGNTASDRRLKRTARRRYTCRRNRILYLQEIFAEEMSKVDDSFFHRLEDSFLVEDDKRGSKYPIFATMQEEKDYHEKFPTIYHLRKELADKKEKANLRLVYLALAHIIKFRGHFLIEDDSFDVRNTDIQRQYQAFLEIFDTTFENNHLLSQNIDVEGILTDKISKSAKKDRILAQYPNQKSTGIFAEFLKLIVGNQADFKKHFNLEDKTPLQFAKDSYDEDLENLLGQIGDEFADLFSVAKKLYDSVLLSGILTVTDLSTKAPLSASMIQRYDEHREDLKQLKQFVKASLPEKYQEIFTDSSKDGYAGYIEGKTNQGAFYKYLSKLLTKQEGSEYFLEKIKNEDFLRKQRTFDNGSIPHQVHLTELKAIIRRQSEYYPFLKENLDRIEKILTFRIPYYVGPLAREKSDFAWMTRKTDDSIRPWNFEELVDKEASAEAFIHRMTNNDLYLPEEKVLPKHSLIYEKFTVYNELTKVRYKNEQGETYFFDSNIKQEIFDGVFKEHRKVSKKKLLDFLAKEYEEFRIVDVIGLDKENKAFNASLGTYHDLKKILDKDFLDNPDNESILEDIVQTLTLFEDREMIKKRLENYKDLFTESQLKKLYRRHYTGWGRLSAKLINGIRDKESQKTILDYLISDGRANRNFMQLIHDDGLSFKPIIDKAQAGSHSDNLKEVVGELAGSPAIKKGILQSLKIVDELVKVMGYEPEQVVVEMARENQTTNQGRRNTRQRYKLLEEGVKNLASNILKEYPTDNQALQNERLFLYYLQNGRDMYTGEALDIDNLSQYDIDHIVPQAFIKDDSIDNRVLVSSAKNRGKSDNVPSIDIVKARKAFWKKLLDAKLMSQRKYDNLTKAERGGLTSDDKARFIQRQLVETRQITKHVARILDERFNNELDSKGRRIRKVKIVTLKSNLVSNFRKEFGFYKIREVNDYHHAHDAYLNAVVAKAILTKYPQLEPEFVYGDYPKYNSYKTRKATEKLFFYSNIMNFFKTKVTLADGTVVVKDDIEVNNDTGEIVWDKKKHFATVRKVLSYPQVNIVKKTEIQTGGFSKESILAHGNSDKLIPRKTKDIYLDPKKYGGFDSPIVAYSVLVVADIKKGKAQKLKTVTELLGITIMERFRFEKNPSAFLESKGYLNIRDDKLMILPKYSLFELENGRRRLLASAGELQKGNELALPTQYMKFLYLASRYNELKGKPEEIEQKQEFVVQHVSYFDDILQIINDFSNRVILADANLEKINKLYQDNKENISVDELANNIINLFTFTSLGAPAAFKFFDKIVDRKRYTSTKEVLNSTLIHQSITGLYETRIDLGKLGED

SEQ ID NO: 66 - protein, 1365 aa, Streptococcus agalactiae
MNKPYSIGLDIGTNSVGYSVVTDDYKVPAKKMRVLGNTDKEYIKKNLIGALLFDGGNTASDRRLKRTARRRYTRRRNRILYLQEIFAEEMSKVDDSFFHRLEDSFLVEDDKRGSKYPIFATMQEEKDYHEKFPTIYHLRKELADKKEKADLRLVYLALAHIIKFRGHFLIEDDSFDVRNTDIQRQYQAFLEIFDTTFENNHLLSQNIDVEGILTDKISKSAKKDRILAQYPNQKSTGIFAEFLKLIVGNQADFKKHFNLEDKTPLQFAKDSYDEDLENLLGQIGDEFADLFSVAKKLYDSVLLSGILTVTDLSTKAPLSASMIQRYDEHREDLKQLKQFVKASLPEKYQEIFTDSSKDGYAGYIEGKTNQGAFYKYLSKLLTKQEGSEYFLEKIKNEDFLRKQRTFDNGSIPHQVHLTELKAIIRRQSEYYPFLKENLDRIEKILTFRIPYYVGPLAREKSDFAWMTRKTDDSIRPWNFEELVDKEASAEAFIHRMTNNDLYLPEEKVLPKHSLIYEKFTVYNELTKVRYKNEQGETYFFDSNIKQEIFDGVFKEHRKVSKKKLLDFLAKEYEEFRIVDVIGLDKENKAFNASLGTYHDLKKILDKDFLDNPDNESILEDIVQTLTLFEDREMIKKRLENYKDLFTESQLKKLYRRHYTGWGRLSAKLINGIRDKESQKTILDYLISDGRANRNFMQLIHDDGLSFKPIIDKAQAGSHSDNLKEVVGELAGSPAIKKGILQSLKIVDELVKVMGYEPEQVVVEMARENQTTNQGRRNTRQRYKLLEEGVKNLASNILKEYPTDNQALQNERLFLYYLQNGRDMYTGEALDIDNLSQYDIDHIVPQAFIKDDSIDNRVLVSSAKNRGKSDNVPSIDIVKARKAFWKKLLDAKLMSQRKYDNLTKAERGGLTSDDKARFIQRQLVETRQITKHVARILDERFNNELDSKGRRIRKVKIVTLKSNLVSNFRKEFGFYKIREVNDYHHAHDAYLNAVVAKAILTKYPQLEPEFVYGDYPKYNSYKTRKATEKLFFYSNIMNFFKTKVTLADGTVVVKDDIEVNNDTGEIVWDKKKHFATVRKVLSYPQVNIVKKTEIQTGGFSKESILAHGNSDKLIPRKTKDIYLDPKKYGGFDSPIVAYSVLVVADIKKGKAQKLKTVTELLGITIMERFRFEKNPSAFLESKGYLNIRDDKLMILPKYSLFELENGRRRLLASAGELQKGNELALPTQYMKFLYLASRYNELKGKPEEIEQKQEFVVQHVSYFDDILQIINDFSNRVILADANLEKINKLYQDNKENISVDELANNIINLFTFTSLGAPAAFKFFDKIVDRKRYTSTKEVLNSTLIHQSITGLYETRIDLGKLGED

SEQ ID NO: 67 - protein, 1365 aa, Streptococcus agalactiae
MNKPYSIGLDIGTNSVGYSVVTDDYKVPAKKMRVLGNTDKEYIKKNLIGALLFDGGNTASDRRLKRTARRRYTRRRNRILYLQEIFAEEMSKVDDSFFHRLEDSFLVEDDKRGSKYPIFATMQEEKDYHEKFPTIYHLRKELADKKEKADLRLVYLALAHIIKFRGHFLIEDDSFDVRNTDIQRQYQAFLEIFDTTFENNHLLSQNIDVEGILTDKISKSAKKDRILAQYPNQKSTGIFAEFLKLIVGNQADFKKHFNLEDKTPLQFAKDSYDEDLENLLGQIGDEFADLFSVAKKLYDSVLLSGILTVTDLSTKAPLSASMIQRYDEHREDLKQLKQFVKASLPEKYQEIFTDSSKDGYAGYIEGKTNQGAFYKYLSKLLTKQEGSEYFLEKIKNEDFLRKQRTFDNGSIPHQVHLTELKAIIRRQSEYYPFLKENLDRIEKILTFRIPYYVGPLAREKSDFAWMTRKTDDSIRPWNFEELVDKEASAEAFIHRMTNNDLYLPEEKVLPKHSLIYEKFTVYNELTKVRYKNEQGETYFFDSNIKQEIFDGVFKEHRKVSKKKLLDFLAKEYEEFRIVDVIGLDKENKAFNASLGTYHDLKKILDKDFLDNPDNESILEDIVQTLTLFEDREMIKKRLENYKDLFTESQLKKLYRRHYTGWGRLSAKLINGIRDKESQKTILDYLISDGRANRNFMQLIHDDGLSFKPIIDKAQAGSHSDNLKEVVGELAGSPAIKKGILQSLKIVDELVKVMGYEPEQVVVEMARENQTTNQGRRNTRQRYKLLEEGVKNLASNILKEYPTDNQALQNERLFLYYLQNGRDMYTGETLDIDNLSQYDIDHIVPQAFIKDDSIDNRVLVSSAKNRGKSDNVPSIDIVKARKAFWKKLLDAKLMSQRKYDNLTKAERGGLTSDDKARFIQRQLVETRQITKHVARILDERFNNELDSKGRRIRKVKIVTLKSNLVSNFRKEFGFYKIREVNDYHHAHDAYLNAVVAKAILTKYPQLEREFVYGDYPKYNSYKTRKATEKLFFYSNIMNFFKTKVTLADGTVVVKDDIEVNNDTGEIVWDKKKHFATVRKVLSYPQVNIVKKTEIQTGGFSKESILAHGNSDKLIPRKTKDIYLDPKKYGGFDSPIVAYSVLVVADIKKGKAQKLKTVTELLGITIMERFRFEKNPSAFLESKGYLNIRDDKLMILPKYSLFELENGRRRLLASAGELQKGNELALPTQYMKFLYLASRYNELKGKPEEIEQKQEFVVQHVSYFDDILQIINDFSNRVILADANLEKINKLYQDNKENISVDELANNIINLFTFTSLGAPAAFKFFDKIVDRKRYTSTKEVLNSTLIHQSITGLYETRIDLGKLGED

SEQ ID NO: 68 - protein, 1365 aa, Streptococcus agalactiae
MNKPYSIGLDIGTNSVGYSVVTDDYKVPAKKMRVLGNTDKEYIKKNLIGALLFDGGNTASDRRLKRTARRRYTRRRNRILYLQEIFAEEMSKVDDSFFHRLEDSFLVEDDKRGSKYPIFATMQEEKDYHEKFPTIYHLRKELADKKEKANLRLVYLALAHIIKFRGHFLIEDDSFDVRNTDIQRQYQAFLEIFDTTFENNHLLSQNIDVEGILTDKISKSAKKDRILAQYPNQKSTGIFAEFLKLIVGNQADFKKHFNLEDKTPLQFAKDSYDEDLENLLGQIGDEFADLFSVAKKLYDSVLLSGILTVTDLSTKAPLSASMIQRYDEHREDLKQLKQFVKASLPEKYQEIFTDSSKDGYAGYIEGKTNQGAFYKYLSKLLTKQEGSEYFLEKIKNEDFLRKQRTFDNGSIPHQVHLTELKAIIRRQSEYYPFLKENLDRIEKILTFRIPYYVGPLAREKSDFAWMTRKTDDSIRPWNFEELVDKEASAEAFIHRMTNNDLYLPEEKVLPKHSLIYEKFTVYNELTKVRYKNEQGETYFFDSNIKQEIFDGVFKEHRKVSKKKLLDFLAKEYEEFRIVDVIGLDKENKAFNASLGTYHDLKKILDKDFLDNPDNESILEDIVQTLTLFEDREMIKKRLENYKDLFTESQLKKLYRRHYTGWGRLSAKLINGIRDKESQKTILDYLISDGRANRNFMQLIHDDGLSFKPIIDKAQAGSHSDNLKEVVGELAGSPAIKKGILQSLKIVDELVKVMGYEPEQVVVEMARENQTTNQGRRNTRQRYKLLEEGVKNLASNILKEYPTDNQALQNERLFLYYLQNGRDMYTGEALDIDNLSQYDIDHIVPQAFIKDDSIDNRVLVSSAKNRGKSDNVPSIDIVKARKAFWKKLLDAKLMSQRKYDNLTKAERGGLTSDDKARFIQRQLVETRQITKHVARILDERFNNELDSKGRRIRKVKIVTLKSNLVSNFRKEFGFYKIREVNDYHHAHDAYLNAVVAKAILTKYPQLEPEFVYGDYPKYNSYKTRKATEKLFFYSNIMNFFKTKVTLADGTVVVKDDIEVNNDTGEIVWDKKKHFATVRKVLSYPQVNIVKKTEIQTGGFSKESILAHGNSDKLIPRKTKDIYLDPKKYGGFDSPIVAYSVLVVADIKKGKAQKLKTVTELLGITIMERFRFEKNPSAFLESKGYLNIRDDKLMILPKYSLFELENGRRRLLASAGELQKGNELALPTQYMKFLYLASRYNELKGKPEEIEQKQEFVVQHVSYFDDILQIINDFSNRVILADANLEKINKLYQDNKENISVDELANNIINLFTFTSLGAPAAFKFFDKIVDRKRYTSTKEVLNSTLIHQFITGLYETRIDLGKLGED

SEQ ID NO: 69 - protein, 1365 aa, Streptococcus agalactiae
MNKPYSIGLDIGTNSVGYSVVTDDYKVPAKKMRVLGNTDKEYIKKNLIGALLFDGGNTASDRRLKRTARRRYTRRRNRILYLQEIFAEEMSKVDDSFFHRLEDSFLVEDDKRGSKYPIFATMQEEKDYHEKFPTIYHLRKELADKKEKANLRLVYLALAHIIKFRGHFLIEDDSFDVRNTDIQRQYQAFLEIFDTTFENNHLLSQNIDVEGILTDKISKSAKKDRILAQYPNQKSTGIFAEFLKLIVGNQADFKKHFNLEDKTPLQFAKDSYDEDLENLLGQIGDEFADLFSVAKKLYDSVLLSGILTVTDLSTKAPLSASMIQRYDEHREDLKQLKQFVKASLPEKYQEIFTDSSKDGYAGYIEGKTNQGAFYKYLSKLLTKQEGSEYFLEKIKNEDFLRKQRTFDNGSIPHQVHLTELKAIIRRQSEYYPFLKENLDRIEKILTFRIPYYVGPLAREKSDFAWMTRKTDDSIRPWNFEELVDKEASAEAFIHRMTNNDLYLPEEKVLPKHSLIYEKFTVYNELTKVRYKNEQGETYFFDSNIKQEIFDGVFKEHRKVSKKKLLDFLAKEYEEFRIVDVIGLDKENKAFNASLGTYHDLKKILDKDFLDNPDNESILEDIVQTLTLFEDREMIKKRLENYKDLFTESQLKKLYRRHYTGWGRLSAKLINGIRDKESQKTILDYLISDGRANRNFMQLIHDDGLSFKPIIDKAQAGSHSDNLKEVVGELAGSPAIKKGILQSLKIVDELVKVMGYEPEQVVVEMARENQTTNQGRRNTRQRYKLLEEGVKNLASNILKEYPTDNQALQNERLFLYYLQNGRDMYTGEALDIDNLSQYDIDHIVPQAFIKDDSIDNRVLVSSAKNRGKSDNVPSIDIVKARKAFWKKLLDAKLMSQRKYDNLTKAERGGLTSDDKARFIQRQLVETRQITKHVARILDERFNNELDSKGRRIRKVKIVTLKSNLVSNFRKEFGFYKIREVNDYHHAHDAYLNAVVAKAILTKYPQLEPEFVYGDYPKYNSYKTRKATEKLFFYSNIMNFFKTKVTLADGTVVVKDDIEVNNDTGEIVWDKKKHFATVRKVLSYPQVNIVKKTEIQTGGFSKESILAHGNSDKLIPRKTKDIYLDPKKYGGFDSPIVAYSVLVVADIKKGKAQKLKTVTELLGITIMERFRFEKNPSAFLESKGYLNIRDDKLMILPKYSLFELENGRRRLLASAGELQKGNELALPTQYMKFLYLASRYNELKGKPEEIEQKQEFVVQHVSYFDDILQIINDFSNRVILADANLEKINKLYQDNKENISVDELANNIINLFTFTSLGAPAAFKFFDKIVDRKRYTSTKEVLNSTLIHQSITGLYETRIDLGKLGED

SEQ ID NO: 70 - protein, 1365 aa, Streptococcus agalactiae
MNKPYSIGLDIGTNSVGWSIITDDYKVPAKKMRVLGNTDKEYIKKNLIGALLFDGGNTAADRRLKRTARRRYTRRRNRILYLQEIFAEEMSKVDDSFFHRLEDSFLVEEDKRGSKYPIFATMQEEKDYHEKFPTIYHLRKELADKKEKADLRLVYLALAHIIKFRGHFLIEDDRFDVRNTDIQKQYQAFLEIFDTSFENNHLLSQNVDVEAILTDKISKSAKKDRILAQYPNQKSTGIFAEFLKLIVGNQADFKKHFNLEDKTPLQFAKDSYDEDLENLLGQIGDEFADLFSAAKKLYDSVLLSGILTVTDLSTKAPLSASMIQRYDEHREDLKQLKQFVKASLPEKYQEIFADSSKDGYAGYIEGKTNQEAFYKYLSKLLTKQEDSEYFLEKIKNEDFLRKQRTFDNGSIPHQVHLTELKAIIRRQSEYYPFLKENQDKIEKILTFRIPYYVGPLARGNSDFAWMTRKTDDSIRPWNFEDLVDKEKSAEAFIHRMTNNDLYLPEEKVLPKHSLIYEKFTVYNELTKVRYKNEQGETYFFDSNVKQEIFDGVFKEHRKVSKKQLLDFLAKEFEEFRIVDVTGLDKENKAFNASLGTYHDLKKILDKDFLDNPDNESILEDIVQTITLFEDREMIKKRLENYKDLFTESQLKKLYRRHYTGWGRLSAKLINGIRDRESQKTILDYLISDGRANRNFMQLINDDGLSFKSIISKAQSGSHSDNLKEVVGELAGSPAIKKGILQSLKIVDELVKVMGYEPEQIVVEMARENQTTNQGRRNSRQRYKLLEDGVKNLASDILKEYPTDNQALQNERLFLYYLQNGRDMYTGEALDIDNLSQYDIDHIVPQAFIKDDSIDNRVLVSSAKNRGKSDDVPSIDIVKARKAFWKKLLDAKLISQRKYDNLTKAERGGLTPDDKAGFIQRQLVETRQITKHVARILDERFNNKVDDNNKPIRKVKIVTLKSNLVSNFRKEFGFYKIREVNNYHHAHDAYLNAVVAKAILTKYPQLEPEFVYGDYPKYNSYKTRKATEKLFFYSNIMNFFKTKVTLADETVVVKDDIEVNNETGEIAWDKKKHFATVRKVLSYPQVNIVKKTEVQTGGFSKESILAHSNSDKLIPRKTKDIYLDPKKYGGFDSPIVAYSVLVLADIKKGKAQKLKTVKELIGITIMERERFEKNPSAFLESKGYLNIRTDKLIILPKYSLFELENGRRRLLASAGELQKGNELALPTQYMKFLYLASRYNESKGKPEEIEKKQEFVNQHVSYFDDILQLINDFSKRVILADANLEKINKLYSDNKDNTPVDELAKNIINLFTFTSLGAPAAFKFFDKSVDRKRYTSTKEVLDSTLIHQSITGLYETRIDLGKLGED

SEQ ID NO: 71 - protein, 1365 aa, Streptococcus agalactiae
MNKPYSIGLDIGTNSVGWSIITDDYKVPAKKMRVLGNTDKEYIKKNLIGALLFDGGNTAADRRLKRTARRRYTRRRNRILYLQEIFAEEMSKVDDSFFHRLEDSFLVEEDKRGSKYPIFATMQEEKYYHEKFPTIYHLRKELADKKEKADLRLIYLALAHIIKFRGHFLIEDDRFDVRNTDIQKQYQAFLEIFDTTFENNDLLSQNVDVEAILTDKISKSAKKDRILARYPNQKSTGIFAEFLKLIVGNQADFKKHFNLEDKTPLQFAKDSYDEDLENLLGQIGDEFADLFSAAKKLYDSVLLSGILTVTDLSTKAPLSASMIQRYDEHREDLKQLKQFVKASLPEKYQEIFADSSKDGYAGYIEGKTNQEAFYKYLSKLLTKQEGSEYLLEKIKNEDFLRKQRTFDNGSIPHQVHLTELRAIIRRQSEYYPFLKENLDRIEKILTFRIPYYVGPLAREKSDFAWMTRKTDDSIRPWNFEDLVDKEKSAEAFIHRMTNNDLYLPEEKVLPKHSLIYEKFTVYNELTKVRFLAEGFKDFQFLNRKQKETIFNSLFKEKRKVTEKDIISFLNKVDGYEGIAIKGIEKQFNASLSTYHDLKKILGKDFLDNTDNELILEDIVQTLTLFEDREMIRKRLDIYKDFFTESQLKKLYRRHYTGWGRLSAKLINGIRNKENQKTILDYLIDDGSANRNFMQLIKDAGLSFKPIIDKARTGSHSDNLKEVVGELAGSPAIKKGILQSLKIVDELVKVMGYEPEQIVVEMARENQTTAKGLSRLRQRLTTLRESLANLKSEKKPKYVKDQVENHHLSDDRLFLYYLQNGKDMYTDDELDIDNLSQYDIDLIIPQAFIKDDSIDNRVLVSSAKNRGKSDDVPSVEIVKDCKVFWKKLLDAKLMSQRKYDNLTKAERGGLTSDDKARFIQRQLVETRQITKHVARILDERFNNELDSKGRRIRKVKIVTLKSNLVSNFRKEFGFYKIREVNNYHHAHDAYLNAVVAKAILTKYPQLEPEFVYGDYPKYNSYKTRKATEKLFFYSNIMNFFKTKVTLADGTVVVKDDIEVNNDTGEIVWDKKKHFATVRKVLSYPQVNIVKKTEIQTGGFSKESILAHGNSDKLIPRKTKDIYLDPKKYGGFDSPIVAYSVLVVADIKKGKAQKLKTVTELLGITIMERSRFEKNPSAFLESKGYLNIRDDKLMILPKYSLFELENGRRRLLASADELQKGNELALPTQFMKFLYLASRYNELKGKPEEIEQKQEFVVQHVSYFDDILQIINDFSNRVILADANLEKINKLYQDNKENIPVDELANNIINLFTFTSLGAPAAFKFFDKIVDRKRYTSTKEVLNSTLIHQSITGLYETRIDLGKLGED

SEQ ID NO: 72 - protein, 1365 aa, Streptococcus agalactiae
MNKPYSIGLDIGTNSVGWSIITDDYKVPAKKMRVLGNTDKEYIKKNLIGALLFDGGNTASDRRLKRTARRRYTRRRNRILYLQEIFAEEMSKVDDSFFHRLEDSFLVEDDKRGSKYPIFATMQEEKDYHEKFPTIYHLRKELADKKEKADLRLFYLALAHIIKFRGHFLIEDDSFDVRNTDIQRQYQAFLEIFDTTFENNHLLSQNIDIEGILTDKISKSAKKDRILAQYPNQKSTGIFAEFLKLIVGNQADFKKHFNLEDKTPLQFAKDSYDEDLENLLGQIGDEFADLFSVAKKLYDSVLLSGILTVTDLSTKAPLSASMIQRYDEHREDLKQLKQFVKASLPEKYQEIFTDSSKDGYAGYIEGKTNQGAFYKYLSKLLTKQEGSEYFLEKIKNEDFLRKQRTFDNGSIPHQVHLTELKAIIRRQSEYYPFLKENLDRIEKILTFRIPYYVGPLAREKSDFAWMTRKTDDSIRPWNFEELVDKEASAEAFIHRMTNNDLYLPEEKVLPKHSLIYEKFTVYNELTKVRYKNEQGETYFFDSNIKQEIFDGVFKEHRKVSKKKLLDFLAKEYEEFRIVDVIGLDKENKAFNASLGTYHDLKKILDKDFLDNPDNESILEDIVQTLTLFEDREMIKKRLENYKDLFTESQLKKLYRRHYTGWGRLSAKLINGIRDKESQKTILDYLIDDGKSNRNFMQLIHDDGLSFKSIISKAQAGSHSDNLKEVVGELAGSPAIKKGILQSLKIVDELVKVMGYEPEQIVVEMARENQTTNQGRRNSRQRYKLLDDGVKNLASNILKEYPTDNQALQNERLFLYYLQNGRDMYTGKALDIDNLSQYDIDHIIPQAFIKDDSIDNRVLVSSAKNRGKSDDVPSLEIVKDCKVFWKKLLDAKLMSQRKYDNLTKAERGGLTSDDKARFIQRQLVETRQITKHVARILDERFNNELDSKGRRIRKVKIVTLKSNLVSNFRKEFGFYKIREVNNYHHAHDAYLNAVVAKAILTKYPQLEPEFVYGDYPKYNSYKTRKATEKLFFYSNIMNFFKTKVTLADGTVVVKDDIEVNNDTGEIVWDKKKHFATVRKVLSYPQVNIVKKTEIQTGGFSKESILAHGNSDKLIPRKTKDIYLDPKKYGGFDSPIVAYSVLVVADIKKGKAQKLKTVTELLGITIMERSRFEKNPSAFLESKGYLNIRDDKLMILPKYSLFELENGRRRLLASAGELQKGNELALPTQFMKFLYLASRYNELKGKPEEIEQKQEFVVQHVSYFDDILQIINDFSNRVILADANLEKINKLYQDNKENISVDELANNIINLFTFTSLGAPAAFKFFDKIVDRKRYTSTKEVLNSTLIHQSITGLYETRIDLGKLGED

SEQ ID NO: 73 - protein, 1365 aa, Streptococcus agalactiae
MNKPYSIGLDIGTNSVGWSIITDDYKVPAKKMRVLGNTDKEYIKKNLIGALLFDGGNTASDRRLKRTARRRYTRRRNRILYLQEIFAEEMSKVDDSFFHRLEDSFLVEDDKRGSKYPIFATMQEEKDYHEKFPTIYHLRKELADKKEKADLRLFYLALAHIIKFRGHFLIEDDSFDVRNTDIQRQYQAFLEIFDTTFENNHLLSQNIDVEGILTDKISKSAKKDRILAQYPNQKSTGIFAEFLKLIVGNQADFKKHFNLEDKTPLQFAKDSYDEDLENLLGQIGDEFADLFSVAKKLYDSVLLSGILTVTDLSTKAPLSASMIQRYDEHREDLKQLKQFVKASLPEKYQEIFTDSSKDGYAGYIEGKTNQGAFYKYLSKLLTKQEGSEYFLEKIKNEDFLRKQRTFDNGSIPHQVHLTELKAIIRRQSEYYPFLKENLDRIEKILTFRIPYYVGPLAREKSDFAWMTRKTDDSIRPWNFEELVDKEASAEAFIHRMTNNDLYLPEEKVLPKHSLIYEKFTVYNELTKVRYKNEQGETYFFDSNIKQEIFDGVFKEHRKVSKKKLLDFLAKEYEEFRIVDVIGLDKENKAFNASLGTYHDLKKILDKDFLDNPDNESILEDIVQTLTLFEDREMIKKRLENYKDLFTESQLKKLYRRHYTGWGRLSAKLINGIRDKESQKTILDYLIDDGKSNRNFMQLIHDDGLSFKSIISKAQAGSHSDNLKEVVGELAGSPAIKKGILQSLKIVDELVKVMGYEPEQIVVEMARENQTTNQGRRNSRQRYKLLDDGVKNLASNILKEYPTDNQALQNERLFLYYLQNGRDMYTGKALDIDNLSQYDIDHIIPQAFIKDDSIDNRVLVSSAKNRGKSDDVPSLEIVKDCKVFWKKLLDAKLMSQRKYDNLTKAERGGLTSDDKARFIQRQLVETRQITKHVARILDERFNNELDSKGRRIRKVKIVTLKSNLVSNFRKEFGFYKIREVNNYHHAHDAYLNAVVAKAILTKYPQLEPEFVYGDYPKYNSYKTRKATEKLFFYSNIMNFFKTKVTLADGTVVVKDDIEVNNDTGEIVWDKKKHFATVRKVLSYPQVNIVKKTEIQTGGFSKESILAHGNSDKLIPRKTKDIYLDPKKYGGFDSPIVAYSVLVVADIKKGKAQKLKTVTELLGITIMERSRFEKNPSAFLESKGYLNIRDDKLMILPKYSLFELENGRRRLLASAGELQKGNELALPTQFMKFLYLASRYNELKGKPEEIEQKQEFVVQHVSYFDDILQIINDFSNRVILADANLEKINKLYQDNKENISVDELANNIINLFTFTSLGAPAAFKFFDKIVDRKRYTSTKEVLNSTLIHQSITGLYETRIDLGKLGED

SEQ ID NO: 74 - protein, 1365 aa, Streptococcus agalactiae
MNKPYSIGLDIGTNSVGWSIITDDYKVPAKKMRVLGNTDKEYIKKNLIGALLFDGGNTAADRRLKRTARRRYTRRRNRILYLQEIFAEEMSKVDDSFFHRLEDSFLVEEDKRGSKYPIFATLQEEKDYHEKFPTIYHLRKELADKKEKADLRLIYIALAHIIKFRGHFLIEDDSFDVRNTDISKQYQDFLEIFNTTFENNDLLSQNVDVEAILTDKISKSAKKDRILAQYPNQKSTGIFAEFLKLIVGNQADFKKYFNLEDKTPLQFAKDSYDEDLENLLGQIGDEFADLFSAAKKLYDSVLLSGILTVIDLSTKAPLSASMIQRYDEHREDLKQLKQFVKASLPEKYQEIFADSSKDGYAGYIEGKTNQEAFYKYLSKLLTKQEDSENFLEKIKNEDFLRKQRTFDNGSIPHQVHLTELKAIIRRQSEYYPFLKENQDRIEKILTFRIPYYIGPLAREKSDFAWMTRKTDDSIRPWNFEDLVDKEKSAEAFIHRMTNNDFYLPEEKVLPKHSLIYEKFTVYNELTKVRYKNEQGETYFFDSNIKQEIFDGVFKEHRKVSKKKLLDFLAKEYEEFRIVDVIGLDKENKAFNASLGTYHDLEKILDKDFLDNPDNESILEDIVQTLTLFEDREMIKKRLENYKDLFTESQLKKLYRRHYTGWGRLSAKLINGIRDKESQKTILDYLIDDGRSNRNFMQLINDDGLSFKSIISKAQAGSHSDNLKEVVGELAGSPAIKKGILQSLKIVDELVKVMGYEPEQIVVEMARENQTTNQGRRNSRQRYKLLDDGVKNLASNILKEYPTDNQALQNERLFLYYLQNGRDMYTGEALDIDNLSQYDIDHIIPQAFIKDDSIDNRVLVSSAKNRGKSDDVPSLEIVKDCKVFWKKLLDAKLMSQRKYDNLTKAERGGLTSDDKARFIQRQLVETRQITKHVARILDERFNNELDSKGRRIRKVKIVTLKSNLVSNFRKEFGFYKIREVNNYHHAHDAYLNAVVAKAILTKYPQLEPEFVYGDYPKYNSYKTRKATEKLFFYSNIMNFFKTKVTLADGTVVVKDDIEVNNDTGEIVWDKKKHFATVRKVLSYPQNNIVKKTEIQTGGFSKESILAHGNSDKLIPRKTKDIYLDPKKYGGFDSPIVAYSVLVVADIKKGKAQKLKTVTELLGITIMERSRFEKNPSAFLESKGYLNIRADKLIILPKYSLFELENGRRRLLASAGELQKGNELALPTQFMKFLYLASRYNESKGKPEEIEKKQEFVNQHVSYFDDILQLINDFSKRVILADANLEKINKLYQDNKENISVDELANNIINLFTFTSLGAPAAFKFFDKIVDRKRYTSTKEVLNSTLIHQSITGLYETRIDLGKLGED

SEQ ID NO: 75 - protein, 1365 aa, Streptococcus agalactiae
MNKPYSIGLDIGTNSVGYSVVTDDYKVPAKKMRVLGNTDKEYIKKNLIGALLFDGGNTASDRRLKRTARRRYTRRRNRILYLQEIFAEEMSKVDDSFFHRLEDSFLVEDDKRGSKYPIFATMQEEKDYHEKFPTIYHLRKELADKKEKADLRLVYLALAHIIKFRGHFLIEDDSFDVRNTDIQRQYQAFLEIFDTTFENNHLLSQNIDVEGILTDKISKSAKKDRILAQYPNQKSTGIFAEFLKLIVGNQADFKKHFNLEDKTPLQFAKDSYDEDLENLLGQIGDEFADLFSVAKKLYDSVLLSGILTVTALSTKAPLSASMIQRYDEHREDLKQLKQFVKASLPEKYQEIFTDSSKDGYAGYIEGKTNQGAFYKYLSKLLTKQEGSEYFLEKIKNEDFLRKQRTFDNGSIPHQVHLTELKAIIRRQSEYYPFLKENLDRIEKILTFRIPYYVGPLAREKSDFAWMTRKTDDSIRPWNFEELVDKEASAEAFIHRMTNNDLYLPEEKVLPKHSLIYEKFTVYNELTKVRYKNEQGETYFFDSNIKQEIFDGVFKEHRKVSKKKLLDFLAKEYEEFRIVDVIGLDKENKAFNASLGTYHDLKKILDKDFLDNPDNESILEDIVQTLTLFEDREMIKKRLENYKDLFTESQLKKLYRRHYTGWGRLSAKLINGIRDKESQKTILDYLISDGRANRNFMQLIHDDGLSFKPIIDKAQAGSHSDNLKEVVGELAGSPAIKKGILQSLKIVDELVKVMGYEPEQVVVEMARENQTTNQGRRNTRQRYKLLEEGVKNLASNILKEYPTDNQALQNERLFLYYLQNGRDMYTGEALDIDNLSQYDIDHIVPQAFIKDDSIDNRVLVSSAKNRGKSDNVPSIDIVKARKAFWKKLLDAKLMSQRKYDNLTKAERGGLTSDDKARFIQRQLVETRQITKHVARILDERFNNELDSKGRRIRKVKIVTLKSNLVSNFRKEFGFYKIREVNDYHHAHDAYLNAVVAKAILTKYPQLEPEFVYGDYPKYNSYKTRKATEKLFFYSNIMNFFKTKVTLADGTVVVKDDIEVNNDTGEIVWDKKKHFATVRKVLSYPQVNIVKKTEIQTGGFSKESILAHGNSDKLIPRKTKDIYLDPKKYGGFDSPIVAYSVLVVADIKKGKAQKLKTVTELLGITIMERFRFEKNPSAFLESKGYLNIRDDKLMILPKYSLFELENGRRRLLASAGELQKGNELALPTQYMKFLYLASRYNELKGKPEEIEQKQEFVVQHVSYFDDILQIINDFSNRVILADANLEKINKLYQDNKENISVDELANNIINLFTFTSLGAPAAFKFFDKIVDRKRYTSTKEVLNSTLIHQSITGLYETRIDLGKLGED

SEQ ID NO: 76 - protein, 1365 aa, Streptococcus agalactiae
MNKPYSIGLDIGTNSVGWSIITDDYKVPAKKMRVLGNTDKEYIKKNLIGALLFDGGNTAADRRLKRTARRRYTRRRNRILYLQEIFAEEMSKVDDSFFHRLEDSFLVEEDKRGSKYPIFATLQEEKDYHEKFSTIYHLRKELADKKEKADLRLIYIALAHIIKFRGHFLIEDDSFDVRNTDISKQYQDFLEIFNTTFENNDLLSQNVDVEAILTDKISKSAKKDRILAQYPNQKSTGIFAEFLKLIVGNQADFKKYFNLEDKTPLQFAKDSYDEDLENLLGQIGDEFADLFSAAKKLYDSVLLSGILTVIDLSTKAPLSASMIQRYDEHREDLKQLKQFVKASLPEKYQEIFADSSKDGYAGYIEGKTNQEAFYKYLSKLLTKQEDSENFLEKIKNEDFLRKQRTFDNGSIPHQVHLTELKAIIRRQSEYYPFLKENQDRIEKILTFRIPYYIGPLAREKSDFAWMTRKTDDSIRPWNFEDLVDKEKSAEAFIHRMTNNDFYLPEEKVLPKHSLIYEKFTVYNELTKVRYKNEQGETYFFDSNIKQEIFDGVFKEHRKVSKKKLLDFLAKEYEEFRIVDVIGLDKENKAFNASLGTYHDLEKILDKDFLDNPDNESILEDIVQTLTLFEDREMIKKRLENYKDLFTESQLKKLYRRHYTGWGRLSAKLINGIRDKESQKTILDYLIDDGRSNRNFMQLINDDGLSFKSIISKAQAGSHSDNLKEVVGELAGSPAIKKGILQSLKIVDELVKVMGYEPEQIVVEMARENQTTNQGRRNSRQRYKLLDDGVKNLASNILKEYPTDNQALQNERLFLYYLQNGRDMYTGEALDIDNLSQYDIDHIIPQAFIKDDSIDNRVLVSSAKNRGKSDDVPSLEIVKDCKVFWKKLLDAKLMSQRKYDNLTKAERGGLTSDDKARFIQRQLVETRQITKHVARILDERFNNELDSKGRRIRKVKIVTLKSNLVSNFRKEFGFYKIREVNNYHHAHDAYLNAVVAKAILTKYPQLEPEFVYGDYPKYNSYKTRKATEKLFFYSNIMNFFKTKVTLADGTVVVKDDIEVNNDTGEIVWDKKKHFATVRKVLSYPQNNIVKKTEIQTGGFSKESILAHGNSDKLIPRKTKDIYLDPKKYGGFDSPIVAYSVLVAADIKKGKAQKLKTVTELLGITIMERSRFEKNPSAFLESKGYLNIRADKLIILPKYSLFELENGRRRLLASAGELQKGNELALPTQFMKFLYLASRYNESKGKPEEIEKKQEFVNQHVSYFDDILQLINDFSKRVILADANLEKINKLYQDNKENISVDELANNIINLFTFTSLGAPAAFKFFDKIVDRKRYTSTKEVLNSTLIHQSITGLYETRIDLGKLGED

SEQ ID NO: 77 - protein, 1365 aa, Streptococcus agalactiae
MNKPYSIGLDIGTNSVGWSIITDDYKVPAKKMRVLGNTDKEYIKKNLIGALLFDGGNTAADRRLKRTARRRYTRRRNRILYLQEIFAEEMSKVDDSFFHRLEDSFLVEEDKRGSKYPIFATLQEEKDYHEKFSTIYHLRKELADKKEKADLRLIYIALAHIIKFRGHFLIEDDSFDVRNTDISKQYQDFLEIFNTTFENNDLLSQNVDVEAILTDKISKSAKKDRILAQYPNQKSTGIFAEFLKLIVGNQADFKKYFNLEDKTPLQFAKDSYDEDLENLLGQIGDEFADLFSAAKKLYDSVLLSGILTVIDLSTKASLSDSMIQRYDEHREDLKQLKQFVKASLPEKYQEIFADSSKDGYAGYIEGKTNQEAFYKYLSKLLTKQEDSENFLEKIKNEDFLRKQRTFDNGSIPHQVHLTELKAIIRRQSEYYPFLKENQDRIEKILTFRIPYYIGPLAREKSDFAWMTRKTDDSIRPWNFEDLVDKEKSAEAFIHRMTNNDFYLPEEKVLPKHSLIYEKFTVYNELTKVRYKNEQGETYFFDSNIKQEIFDGVFKEHRKVSKKKLLDFLAKEYEEFRIVDVIGLDKENKAFNASLGTYHDLEKILDKDFLDNPDNESILEDIVQTLTLFEDREMIKKRLENYKDLFTESQLKKLYRRHYTGWGRLSAKLINGIRDKESQKTILDYLIDDGRSNRNFMQLINDDGLSFKSIISKAQAGSHSDNLKEVVGELAGSPAIKKGILQSLKIVDELVKVMGYEPEQIVVEMARENQTTNQGRRNSRQRYKLLDDGVKNLASNILKEYPTDNQALQNERLFLYYLQNGRDMYTGEALDIDNLSQYDIDHIIPQAFIKDDSIDNRVLVSSAKNRGKSDDVPSLEIVKDCKVFWKKLLDAKLMSQRKYDNLTKAERGGLTSDDKARFIQRQLVETRQITKHVARILDERFNNELDSKGRRIRKVKIVTLKSNLVSNFRKEFGFYKIREVNNYHHAHDAYLNAVVAKAILTKYPQLEPEFVYGDYPKYNSYKTRKATEKLFFYSNIMNFFKTKVTLADGTVVVKDDIEVNNDTGEIVWDKKKHFATVRKVLSYPQNNIVKKTEIQTGGFSKESILAHGNSDKLIPRKTKDIYLDPKKYGGFDSPIVAYSVLVVADIKKGKAQKLKTVTELLGITIMERSRFEKNPSAFLESKGYLNIRADKLIILPKYSLFELENGRRRLLASAGELQKGNELALPTQFMKFLYLASRYNESKGKPEEIEKKQEFVNQHVSYFDDILQLINDFSKRVILADANLEKINKLYQDNKENISVDELANNIINLFTFTSLGAPAAFKFFDKIVDRKRYTSTKEVLNSTLIHQSITGLYETRIDLGKLGED

SEQ ID NO: 78 - protein, 1365 aa, Streptococcus agalactiae
MNKPYSIGLDIGTNSVGWSIITDDYKVPAKKMRVLGNTDKEYIKKNLIGALLFDGGNTAADRRLKRTARRRYTRRRNRILYLQEIFAEEMSKVDDSFFHRLEDSFLVEEDKRGSKYPIFATLQEEKDYHEKFSTIYHLRKELADKKEKADLRLIYIALAHIIKFRGHFLIEDDSFDVRNTDISKQYQDFLEIFNTTFENNDLLSQNVDVEAILTDKISKSAKKDRILAQYPNQKSTGIFAEFLKLIVGNQADFKKYFNLEDKTPLQFAKDSYDEDLENLLGQIGDEFADLFSAAKKLYDSVLLSGILTVIDLSTKAPLSASMIQRYDEHREDLKQLKQFVKASLPEKYQEIFADSSKDGYAGYIEGKTNQEAFYKYLSKLLTKQEDSENFLEKIKNEDFLRKQRTFDNGSIPHQVHLTELKAIIRRQSEYYPFLKENQDRIEKILTFRIPYYIGPLAREKSDFAWMTRKTDDSIRPWNFEDLVDKEKSAEAFIHRMTNNDFYLPEEKVLPKHSLIYEKFTVYNELTKVRYKNEQGETYFFDSNIKQEIFDGVFKEHRKVSKKKLLDFLAKEYEEFRIVDVIGLDKENKAFNASLGTYHDLEKILDKDFLDNPDNESILEDIVQTLTLFEDREMIKKRLENYKDLFTESQLKKLYRRHYTGWGRLSAKLINGIRDKESQKTILDYLIDDGRSNRNFMQLINDDGLSFKSIISKAQAGSHSDNLKEVVGELAGSPAIKKGILQSLKIVDELVKVMGYEPEQIVVEMARENQTTNQGRRNSRQRYKLLDDGVKNLASNILKEYPTDNQALQNERLFLYYLQNGRDMYTGEALDIDNLSQYDIDHIIPQAFIKDDSIDNRVLVSSAKNRGKSDDVPSLEIVKDCKVFWKKLLDAKLMSQRKYDNLTKAERGGLTSDDKARFIQRQLVEIRQITKHVARILDERFNNELDSKGRRIRKVKIVTLKSNLVSNFRKEFGFYKIREVNNYHHAHDAYLNAVVAKAILTKYPQLEPEFVYGDYPKYNSYKTRKATEKLFFYSNIMNFFKTKVTLADGTVVVKDDIEVNNDTGEIVWDKKKHFATVRKVLSYPQNNIVKKTEIQTGGFSKESILAHGNSDKLIPRKTKDIYLDPKKYGGFDSPIVAYSVLVVADIKKGKAQKLKTVTELLGITIMERSRFEKNPSAFLESKGYLNIRADKLIILPKYSLFELENGRRRLLASAGELQKGNELALPTQFMKFLYLASRYNESKGKPEEIEKKQEFVNQHVSYFDDILQLINDFSKRVILADANLEKINKLYQDNKENISVDELANNIINLFTFTSLGAPAAFKFFDKIVDRKRYTSTKEVLNSTLIHQSITGLYETRIDLGKLGED

SEQ ID NO: 79 - protein, 1365 aa, Streptococcus agalactiae
MNKPYSIGLDIGTNSVGWSIITDDYKVPAKKMRVLGNTDKEYIKKNLIGALLFDGGNTAADRRLKRTARRRYTRRRNRILYLQEIFAEEMSKVDDSFFHRLEDSFLVEEDKRGSKYPIFATLQEEKDYHEKFSTIYHLRKELADKKEKADLRLIYIALAHIIKFRGHFLIEDDSFDVRNTDISKQYQDFLEIFNTTFENNDLLSQNVDVEAILTDKISKSAKKDRILAQYPNQKSTGIFAEFLKLIVGNQADFKKYFNLEDKTPLQFAKDSYDEDLENLLGQIGDEFADLFSAAKKLYDSVLLSGILTVIDLSTKAPLSASMIQRYDEHREDLKQLKQFVKASLPEKYQEIFADSSKDGYAGYIEGKTNQEAFYKYLSKLLTKQEDSENFLEKIKNEDFLRKQRTFDNGSIPHQVHLTELKAIIRRQSEYYPFLKENQDRIEKILTFRIPYYIGPLAREKSDFAWMTRKTDDSIRPWNFEDLVDKEKSAEAFIHRMTNNDFYLPEEKVLPKHSLIYEKFTVYNELTKVRYKNEQGETYFFDSNIKQEIFDGVFKEHRKVSKKKLLDFLAKEYEEFRIVDVIGLDKENKAFNASLGTYHDLEKILDKDFLDNPDNESILEDIVQTLTLFEDREMIKKRLENYKDLFTESQLKKLYRRHYTGWGRLSAKLINGIRDKESQKTILDYLIDDGRSNRNFMQLINDDGLSFKSIISKAQAGSHSDNLKEVVGELAGSPAIKKGILQSLKIVDELVKVMGYEPEQIVVEMARENQTTNQGRRNSRQRYKLLDDGVKNLASNILKEYPTDNQALQNERLFLYYLQNGRDMYTGEALDIDNLSQYDIDHIIPQAFIKDDSIDNRVLVSSAKNRGKSDDVPSLEIVKDCKVFWKKLLDAKLMSQRKYDNLTKAERGGLTSDDKARFIQRQLVETRQITKHVARILDERFNNELDSKGRRIRKVKIVTVKSNLVSNFRKEFGFYKIREVNNYHHAHDAYLNAVVAKAILTKYPQLEPEFVYGDYPKYNSYKTRKATEKLFFYSNIMNFFKTKVTLADGTVVVKDDIEVNNDTGEIVWDKKKHFATVRKVLSYPQNNIVKKTEIQTGGFSKESILAHGNSDKLIPRKTKDIYLDPKKYGGFDSPIVAYSVLVVADIKKGKAQKLKTVTELLGITIMERSRFEKNPSAFLESKGYLNIRADKLIILPKYSLFELENGRRRLLASAGELQKGNELALPTQFMKFLYLASRYNESKGKPEEIEKKQEFVNQHVSYFDDILQLINDFSKRVILADANLEKINKLYQDNKENISVDELANNIINLFTFTSLGAPAAFKFFDKIVDRKRYTSTKEVLNSTLIHQSITGLYETRIDLGKLGED

SEQ ID NO: 80 - protein, 1365 aa, Streptococcus agalactiae
MNKPYSIGLDIGTNSVGWSIITDDYKVPAKKMRVLGNTDKEYIKKNLIGALLFDGGNTAADRRLKRTARRRYTRRRNRILYLQEIFAEEMSKVDDSFFHRLEDSFLVEEDKRGSKYPIFATLQEEKDYHEKFSTIYHLRKELADKKEKADLRLIYIALAHIIKFRGHFLIEDDSFDVRNTDISKQYQDFLEIFNTTFENNDLLSQNVDVEAILTDKISKSAKKDRILAQYPNQKSTGIFAEFLKLIVGNQADFKKYFNLEDKTPLQFAKDSYDEDLENLLGQIGDEFADLFSAAKKLYDSVLLSGILTVIDLSTKAPLSASMIQRYDEHREDLKQLKQFVKASLPEKYQEIFADSSKDGYAGYIEGKTNQEAFYKYLSKLLTKQEDSENFLEKIKNEDFLRKQRTFDNGSIPHQVHLTELKAIIRRQSEYYPFLKENQDRIEKILTFRIPYYIGPLAREKSDFAWMTRKTDDSIRPWNFEDLVDKEKSAEAFIHRMTNNDFYLPEEKVLPKHSLIYEKFTVYNELTKVRYKNEQGETYFFDSNIKQEIFDGVFKEHRKVSKKKLLDFLAKEYEEFRIVDVIGLDKENKAFNASLGTYHDLEKILDKDFLDNPDNESILEDIVQTLTLFEDREMIKKRLENYKDLFTESQLKKLYRRHYTGWGRLSAKLINGIRDKESQKTILDYLIDDGRSNRNFMQLINDDGLSFKSIISKAQAGSHSDNLKEVVGELAGSPAIKKGILQSLKIVDELVKVMGYEPEQIVVEMARENQTTNQGRRNSRQRYKLLDDGVKNLASNILKEYPTDNQALQNERLFLYYLQNGRDMYTGEALDIDNLSQYDIDHIIPQAFIKDDSIDNRVLVSSAKNRGKSDDVPSLEIVKDCKVFWKKLLDAKLMSQRKYDNLTKAERGGLTSDDKARFIQRQLVETRQITKHVARILDELFNNELDSKGRRIRKVKIVTLKSNLVSNFRKEFGFYKIREVNNYHHAHDAYLNAVVAKAILTKYPQLEPEFVYGDYPKYNSYKTRKATEKLFFYSNIMNFFKTKVTLADGTVVVKDDIEVNNDTGEIVWDKKKHFATVRKVLSYPQNNIVKKTEIQTGGFSKESILAHGNSDKLIPRKTKDIYLDPKKYGGFDSPIVAYSVLVVADIKKGKAQKLKTVTELLGITIMERSRFEKNPSAFLESKGYLNIRADKLIILPKYSLFELENGRRRLLASAGELQKGNELALPTQFMKFLYLASRYNESKGKPEEIEKKQEFVNQHVSYFDDILQLINDFSKRVILADANLEKINKLYQDNKENISVDELANNIINLFTFTSLGAPAAFKFFDKIVDRKRYTSTKEVLNSTLIHQSITGLYETRIDLGKLGGD

SEQ ID NO: 81 - protein, 1365 aa, Streptococcus agalactiae; identical to SEQ ID NO: 50

SEQ ID NO: 82 - protein, 1365 aa, Streptococcus agalactiae
MNKPYSIGLDIGTNSVGYSVVTDDYKVPAKKMRVLGNTDKEYIKKNLIGALLFDGGNTASDRRLKRTARRRYTRRRNRILYLQEIFAEEMSKVDDSFFHRLEDSFLVEDDKRGSKYPIFATMQEEKDYHEKFPTIYHLRKELADKKEKANLRLVYLALAHIIKFRGHFLIEDDSFDVRNTDIQRQYQAFLEIFDTTFENNHLLSQNIDVEGILTDKISKSAKKDRILAQYPNQKSTGIFAEFLKLIVGNQADFKKHFNLEDKTPLQFAKDSYDEDLENLLGQIGDEFADLFSVAKKLYDSVLLSGILTVTDLSTKAPLSASMIQRYDEHREDLKQLKQFVKASLPEKYQEIFTDSSKDGYAGYIEGKTNQGAFYKYLSKLLTKQEGSEYFLEKIKNEDFLRKQRTFDNGSIPHQVHLTELKAIIRRQSEYYPFLKENLDRIEKILTFRIPYYVGPLAREKSDFAWMTRKTDDSIRPWNFEELVDKEASAEAFIHRMTNNDLYLPEEKVLPKHSLIYEKFTVYNELTKVRYKNEQGETYFFDSNIKQEIFDGVFKEHRKVSKKKLLDFLAKEYEEFRIVDVIGLDKENKAFNASLGTYHDLKKILDKDFLDNPDNESILEDIVQTLTLFEDREMIKKRLENYKDLFTESQLKKLYRRHYTGWGRLSAKLINGIRDKESQKTILDYLISDGRANRNFMQLIHDDGLSFKPIIDKAQAGSHSDNLKEVVGELAGSPAIKKGILQSLKIVDELVKVMGYEPEQVVVEMARENQTTNKGRRNTRQRYKLLEEGVKNLASNILKEYPTDNQALQNERLFLYYLQNGRDMYTGEALDIDNLSQYDIDHIVPQAFIKDDSIDNRVLVSSAKNRGKSDNVPSIDIVKARKAFWKKLLDAKLMSQRKYDNLTKAERGGLTSDDKARFIQRQLVETRQITKHVARILDERFNNELDSKGRRIRKVKIVTLKSNLVSNFRKEFGFYKIREVNDYHHAHDAYLNAVVAKAILTKYPQLEPEFVYGDYPKYNSYKTRKATEKLFFYSNIMNFFKTKVTLADGTVVVKDDIEVNNDTGEIVWDKKKHFATVRKVLSYPQVNIVKKTEIQTGGFSKESILAHGNSDKLIPRKTKDIYLDPKKYGGFDSPIVAYSVLVVADIKKGKAQKLKTVTELLGITIMERFRFEKNPSAFLESKGYLNIRDDKLMILPKYSLFELENGRRRLLASAGELQKGNELALPTQYMKFLYLASRYNELKGKPEEIEQKQEFVVQHVSYFDDILQIINDFSNRVILADANLEKINKLYQDNKENISVDELANNIINLFTFTSLGAPAAFKFFDKIVDRKRYTSTKEVLNSTLIHQSITGLYETRIDLGKLGED

SEQ ID NO: 83 - protein, 1365 aa, Streptococcus agalactiae
MNKPYSIGLDIGTNSVGWSIITDDYKVPAKKMRVLGNTDKEYIKKNLIGALLFDGRNTAADRRLKRTARRRYTRRRNRILYLQEIFAEEMSKVDDSFFHRLEDSFLVEEDKRGSKYPIFATLQEEKDYHEKFSTIYHLRKELADKKEKADLRLIYIALAHIIKFRGHFLIEDDSFDVRNTDISKQYQDFLEIFNTTFENNDLLSQNVDVEAILTDKISKSAKKDRILAQYPNQKSTGIFAEFLKLIVGNQADFKKYFNLEDKTPLQFAKDSYDEDLENLLGQIGDEFADLFSAAKKLYDSVLLSGILTVIDLSTKAPLSASMIQRYDEHREDLKQLKQFVKASLPEKYQEIFADSSKDGYAGYIEGKTNQEAFYKYLSKLLTKQEDSENFLEKIKNEDFLRKQRTFDNGSIPHQVHLTELKAIIRRQSEYYPFLKENQDRIEKILTFRIPYYIGPLAREKSDFAWMTRKTDDSIRPWNFEDLVDKEKSAEAFIHRMTNNDFYLPEEKVLPKHSLIYEKFTVYNELTKVRYKNEQGETYFFDSNIKQEIFDGVFKEHRKVSKKKLLDFLAKEYEEFRIVDVIGLDKENKAFNASLGTYHDLEKILDKDFLDNPDNESILEDIVQTLTLFEDREMIKKRLENYKDLFTESQLKKLYRRHYTGWGRLSAKLINGIRDKESQKTILDYLIDDGRSNRNFMQLINDDGLSFKSIISKAQAGSHSDNLKEVVGELAGSPAIKKGILQSLKIVDELVKVMGYEPEQIVVEMARENQTTNQGRRNSRQRYKLLDDGVKNLASNILKEYPTDNQALQNERLFLYYLQNGRDMYTGEALDIDNLSQYDIDHIIPQAFIKDDSIDNRVLVSSAKNRGKSDDVPSLEIVKDCKVFWKKLLDAKLMSQRKYDNLTKAERGGLTSDDKARFIQRQLVETRQITKHVARILDERFNNELDSKGRRIRKVKIVTLKSNLVSNFRKEFGFYKIREVNNYHHAHDAYLNAVVAKAILTKYPQLEPEFVYGDYPKYNSYKTRKATEKLFFYSNIMNFFKTKVTLADGTVVVKDDIEVNNDTGEIVWDKKKHFATVRKVLSYPQNNIVKKTEIQTGGFSKESILAHGNSDKLIPRKTKDIYLDPKKYGGFDSPIVAYSVLVVADIKKGKAQKLKTVTELLGITIMERSRFEKNPSAFLESKGYLNIRADKLIILPKYSLFELENGRRRLLASAGELQKGNELALPTQFMKFLYLASRYNESKGKPEEIEKKQEFVNQHVSYFDDILQLINDFSKRVILADANLEKINKLYQDNKENISVDELANNIINLFTFTSLGAPAAFKFFDKIVDRKRYTSTKEVLNSTLIHQSITGLYETRIDLGKLGED

SEQ ID NO: 84 - protein, 1365 aa, Streptococcus agalactiae
MNKPYSIGLDIGTNSVGWSIITDDYKVPAKKMRVLGNTDKEYIKKNLIGALLFDGGNTAADRRLKRTARRRYTRRRNRILYLQEIFAEEMSKVDDSFFHRLEDSFLVEEDKRGSKYPIFATMQEEKYYHEKFPTIYHLRKELADKKEKADLRLIYLALAHIIKFRGHFLIEDDSFDVRNTDIQKQYQAFLEIFDTTFENNDLLSQNVDVEAILTDKISKSAKKDRILARYPNQKSTGIFAEFLKLIVGNQADFKKHFNLEDKTPLQFAKDSYDEDLENLLGQIGDEFADLFSAAKKLYDSVLLSGILTVTDLSTKAPLSASMIQRYDEHREDLKQLKQFVKASLPEKYQEIFADSSKDGYAGYIEGKTNQEAFYKYLSKLLTKQEGSEYLLEKIKNEDFLRKQRTFDNGSIPHQVHLTELRAIIRRQSEYYPFLKENLDRIEKILTFRIPYYVGPLAREKSDFAWMTRKTDDSIRPWNFEDLVDKEKSAEAFIHRMTNNDLYLPEEKVLPKHSLIYEKFTVYNELTKVRFLAEGFKDFQFLNRKQKETIFNSLFKEKRKVTEKDIISFLNKVDGYEGIAIKGIEKQFNASLSTYHDLKKILGKDFLDNTDNELILEDIVQTLTLFEDREMIRKRLDIYKDFFTESQLKKLYRRHYTGWGRLSAKLINGIRNKENQKTILDYLIDDGSANRNFMQLIKDAGLSFKPIIDKARTGSHSDNLKEVVGELAGSPAIKKGILQSLKIVDELVKVMGYEPEQIVVEMARENQTTAKGLSRSRQRLTTLRESLANLKSEKKPKYVKDQVENHHLSDDRLFLYYLQNGKDMYTDDELDIDNLSQYDIDHIIPQAFIKDDSIDNRVLVSSAKNRGKSDDVPSVEIVKDCKVFWKKLLDAKLMSQRKYDNLTKAERGGLTSDDKARFIQRQLVETRQITKHVARILDERFNNELDSKGRRIRKVKIVTLKSNLVSNFRKEFGFYKIREVNNYHHAHDAYLNAVVAKAILTKYPQLEPEFVYGDYPKYNSYKTRKATEKLFFYSNIMNFFKTKVTLADGTVVVKDDIEVNNDTGEIVWDKKKHFATVRKVLSYPQVNIVKKTEIQTGGFSKESILAHGNSDKLIPRKTKDIYLDPKKYGGFDSPIVAYSVLVVADIKKGKAQKLKTVTELLGITIMERSRFEKNPSAFLESKGYLNIRDDKLMILPKYSLFELENGRRRLLASAGELQKGNELALPTQFMKFLYLASRYNELKGKPEEIEQKQEFVVQHVSYFDDILQIINDFSNRVILADANLEKINKLYQDNKENIPVDELANNIINLFTFTSLGAPAAFKFFDKIVDRKRYTSTKEVLNSTLIHKSITGLYETRIDLGKLGED

SEQ ID NO: 85 - protein, 1365 aa, Streptococcus agalactiae
MNKPYSIGLDIGTNSVGWSIITDDYKVPAKKMRVLGNTDKEYIKKNLIGALLFDGGNTAADRRLKRTARRRYTRRRNRILYLQEIFAEEMSKVDDSFFHRLEDSFLVEEDKRGSKYPIFATLQEEKDYHEKFSTIYHLRKELADKKEKADLRLIYIALAHIIKFRGHFLIEDDSFDVRNTDISKQYQDFLEIFNTTFENNDLLSQNVDVEAILTDKISKSAKKDRILAQYPNQKSTGIFAEFLKLIVGNQADFKKYFNLEDKTPLQFAKDSYDEDLENLLGQIGDEFADLFSAAKKLYDSVLLSGILTVIDLSTKAPLSASMIQRYDEHREDLKQLKQFVKASLPEKYQEIFADSSKDGYAGYIEGKTNQEAFYKYLSKLLTKQEDSENFLEKIKNEDFLRKQRTFDNGSIPHQVHLTELKAIIRRQSEYYPFLKENQDRIEKILTFRIPYYIGPLAREKSDFAWMTRKTDDSIRPWNFEDLVDKEKSAEAFIHRMTNNDFYLPEEKVLPKHSLIYEKFTVYNELTKVRYKNEQGETYFFDSNIKQEIFDGVFKEHRKVSKKKLLDFLAKEYEEFRIVDVIGLDKENKAFNASLGTYHDLEKILDKDFLDNPDNESILEDIVQTLTLFEDREMIKKRLENYKDLFTESQLKKLYRRHYTGWGRLSAKLINGIRDKESQKTILDYLIDDGRSNRNFMQLINDDGLSFKSIISKAQAGSHSDNLKEVVGELAGSPAIKKGILQSLKIVDELVKVMGYEPEQIVVEMARENQTTNQGRRNSRQRYKLLDDGVKNLASNILKEYPTDNQALQNERLFLYYLQNGRDMYTGEALDIDNLSQYDIDHIIPQAFIKDDSIDNRVLVSSAKNRGKSDDVPSLEIVKDCKVFWKKLLDAKLMSQRKYDNLTKAERGGLTSDDKARFIQRQLVETRQITKHVARILDERFNNELDSKGRRIRKVKIVTLKSNLVSNFRKEFGFYKIREVNNYHHAHDAYLNAVVAKAILTKYPQLEPEFVYGDYPKYNSYKTRKATEKLFFYSNIMNFFKTKVTLADGTVVIKDDIEVNNDTGEIVWDKKKHFATVRKVLSYPQNNIVKKTEIQTGGFSKESILAHGNSDKLIPRKTKDIYLDPKKYGGFDSPIVAYSVLVVADIKKGKAQKLKTVTELLGITIMERSRFEKNPSAFLESKGYLNIRADKLIILPKYSLFELENGRRRLLASAGELQKGNELALPTQFMKFLYLASRYNESKGKPEEIEKKQEFVNQHVSYFDDILQLINDFSKRVILADANLEKINKLYQDNKENISVDELANNIINLFTFTSLGAPAAFKFFDKIVDRKRYTSTKEVLNSTLIHQSITGLYETRIDLGKLGED

SEQ ID NO: 86 - protein, 1365 aa, Streptococcus agalactiae
MNKPYSIGLDIGTNSVGWSIITDDYKVPAKKMRVLGNTDKEYIKKNLIGALLFDGGNTAADRRLKRTARRRYTRRRNRILYLQEIFAEEMSKVDDSFFHRLEDSFLVEEDKRGSKYPIFATLQEEKDYHEKFSTIYHLRKELADKKEKADLRLIYIALAHIIKFRGHFLIEDDSFDVRNTDISKQYQDFLEIFNTTFENNDLLSQNVDVEAILTDKISKSAKKDRILAQYPNQKSTGIFAEFLKLIVGNQADFKKYFNLEDKTPLQFAKDSYDEDLENLLGQIGDEFADLFSAAKKLYDSVLLSGILTVIDLSTKAPLSASMIQRYDEHREDLKQLKQFVKASLPEKYQEIFADSSKDGYAGYIEGKTNQEAFYKYLSKLLTKQEDSENFLEKIKNEDFLRKQRTFDNGSIPHQVHLTELKAIIRRQSEYYPFLKENQDRIEKILTFRIPYYIGPLAREKSDFAWMTRKTDDSIRPWNFEDLVDKEKSAEAFIHRMTNNDFYLPEEKVLPKHSLIYEKFTVYNELTKVRYKNEQGETYFFDSNIKQEIFDGVFKEHRKVSKKKLLDFLAKEYEEFRIVDVIGLDKENKAFNASLGTYHDLEKILDKDFLDNPDNESILEDIVQTLTLFEDREMIKKRLENYKDLFTESQLKKLYRRHYTGWGRLSAKLINGIRDKESQKTILDYLIDDGRSNRNFMQLINDDGLSFKSIISKAQAGSHSDNLKEVVGELAGSPAIKKGILQSLKIVDELVKVMGYEPEQIVVEMARENQTTNQGRRNSRQRYKLLDDGVKNLASNILKEYPTDNQALQNERLFLYYLQNGRDMYTGEALDIDNLSQYDIDHIIPQAFIKDDSIDNRVLVSSAKNRGKSDDVPSLEIVKDCKVFWKKLLDAKLMSQRKYDNLTKAERGGLTSDDKARFIQRQLVETRQITKHVASILDERFNNELDSKGRRIRKVKIVTLKSNLVSNFRKEFGFYKIREVNNYHHAHDAYLNAVVAKAILTKYPQLEPEFVYGDYPKYNSYKTRKATEKLFFYSNIMNFFKTKVTLADGTVVVKDDIEVNNDTGEIVWDKKKHFATVRKVLSYPQNNIVKKTEIQTGGFSKESILAHGNSDKLIPRKTKDIYLDPKKYGGFDSPIVAYSVLVVADIKKGKAQKLKTVTELLGITIMERSRFEKNPSAFLESKGYLNIRADKLIILPKYSLFELENGRRRLLASAGELQKGNELALPTQFMKFLYLASRYNESKGKPEEIEKKQEFVNQHVSYFDDILQLINDFSKRVILADANLEKINKLYQDNKENISVDELANNIINLFTFTSLGAPAAFKFFDKIVDRKRYTSTKEVLNSTLIHQSITGLYETRIDLGKLGED

SEQ ID NO: 87 - protein, 1365 aa, Streptococcus agalactiae
MNKPYSIGLDIGTNSVGYSVVTDDYKVPAKKMRVLGNTDKEYIKKNLIGALLFDGGNTASDRRLKRTARRRYTRRRNRILYLQEIFAEEMSKVDDSFFHRLEDSFLVEDDKRGSKYPIFATMQEEKDYHEKFPTIYHLRKELADKKEKANLRLVYLALAHIIKFRGHFLIEDDSFDVRNTDIQRQYQAFLEIFDTTFENNHLLSQNIDVEGILTDKISKSAKKDRILAQYPNQKSTGIFAEFLKLIVGNQADFKKHFNLEDKTPLQFAKDSYDEDLENLLGQIGDEFADLFSVAKKLYDSVLLSGILTVTDLSTKAPLSASMIQRYDEHREDLKQLKQFVKASLPEKYQEIFTDSSKDGYAGYIESKTNQGAFYKYLSKLLTKQEGSEYFLEKIKNEDFLRKQRTFDNGSIPHQVHLTELKAIIRRQSEYYPFLKENLDRIEKILTFRIPYYVGPLAREKSDFAWMTRKTDDSIRPWNFEELVDKEASAEAFIHRMTNNDLYLPEEKVLPKHSLIYEKFTVYNELTKVRYKNEQGETYFFDSNIKQEIFDGVFKEHRKVSKKKLLDFLAKEYEEFRIVDVIGLDKENKAFNASLGTYHDLKKILDKDFLDNPDNESILEDIVQTLTLFEDREMIKKRLENYKDLFTESQLKKLYRRHYTGWGRLSAKLINGIRDKESQKTILDYLISDGRANRNFMQLIHDDGLSFKPIIDKAQAGSHSDNLKEVVGELAGSPAIKKGILQSLKIVDELVKVMGYEPEQVVVEMARENQTTNQGRRNTRQRYKLLEEGVKNLASNILKEYPTDNQALQNERLFLYYLQNGRDMYTGEALDIDNLSQYDIDHIVPQAFIKDDSIDNRVLVSSAKNRGKSDNVPSIDIVKARKAFWKKLLDAKLMSQRKYDNLTKAERGGLTSDDKARFIQRQLVETRQITKHVARILDERFNNELDSKGRRIRKVKIVTLKSNLVSNFRKEFGFYKIREVNDYHHAHDAYLNAVVAKAILTKYPQLEPEFVYGDYPKYNSYKTRKATEKLFFYSNIMNFFKTKVTLADGTVVVKDDIEVNNDTGEIVWDKKKHFATVRKVLSYPQVNIVKKTEIQTGGFSKESILAHGNSDKLIPRKTKDIYLDPKKYGGFDSPIVAYSVLVVADIKKGKAQKLKTVTELLGITIMERFRFEKNPSAFLESKGYLNIRDDKLMILPKYSLFELENGRRRLLASAGELQKGNELALPTQYMKFLYLASRYNELKGKPEEIEQKQEFVVQHVSYFDDILQIINDFSNRVILADANLEKINKLYQDNKENISVDELANNIINLFTFTSLGAPAAFKFFDKIVDRKRYTSTKEVLNSTLIHQSITGLYETRIDLGKLGED

SEQ ID NO: 88 - protein, 1365 aa, Streptococcus agalactiae
MNKPYSIGLDIGTNSVGWSIITDDYKVPAKKMRVLGNTDKEYIKKNLIGALLFDGGNTAADRRLKRTARRRYTRRRNRILYLQEIFAEEMSKVDDSFFHRLEDSFLVEEDKRGSKYPIFATLQEEKDYHEKFSTIYHLRKELADKKEKADLRLIYIALAHIIKFRGHFLIEDDSFDVRNTDISKQYQDFLEIFNTTFENNDLLSQNVDVEAILTDKISKSAKKDRILAQYPNQKSTGIFAEFLKLIVGNQADFKKYFNLEDKTPLQFAKDSYDEDLENLLGQIGDEFADLFSAAKKLYDSVLLSGILTVIDLSTKAPLSASMIQRYDEHREDLKQLKQFVKASLPEKYQEIFADSSKDGYAGYIEGKTNQEAFYKYLSKLLTKQEDSENFLEKIKNEDFLRKQRTFDNGSIPHQVHLTELKAIIRRQSEYYPFLKENQDRIEKILTFRIPYYIGPLAREKSDFAWMTRKTDDSIRPWNFEDLVDKEKSAEAFIHRMTNNDFYLPEEKVLPKHSLIYEKFTVYNELTKVRYKNEQGETYFFDSNIKQEIFDGVFKEHRKVSKKKLLDFLAKEYEEFRIVDVIGLDKENKAFNASLGTYHDLEKILDKDFLDNPDNESILEDIVQTLTLFEDREMIKKRLENYKDLFTESQLKKLYRRHYTGWGRLSAKLINGIRDKESQKTILDYLIDDGRSNRNFMQLINDDGLSFKSIISKAQAGSHSDNLKEVVGELAGSPAIKKGILQSLKIVDELVKVMGYEPEQIVVEMARENQTTNQGRRNSRQRYKLLDDGVKNLASNILKEYPTDNQALQNERLFLYYLQNGRDMYTGEALDIDNLSQYDIDHIIPQAFIKDDSIDNRVLVSSAKNRGKSDDVPSLEIVKDCKVFWKKLLDAKLMSQRKYDNLTKAERGGLTSDDKARFIQRQLVETRQITKHVARILDERFNNELDSKGRRIRKVKIVTLKSNLVSNFRKEFGFYKIREVNNYHHAHDAYLNAVVAKAILTKYPQLEPEFVYGDYPKYNSYKTRKATEKLFFYSNIMNFFKTKVTLADGTVVVKDDIEVNNDTGEIVWDKKKHFATVRKVLSYPQNNIVKKTEIQTGGFSKESILAHGNSDKLIPRKTKDIYLDPKKYGGFDSPIVAYSVLVVADIKKGKAQKLKTVTELLGITIMERSRFEKNLSAFLESKGYLNIRADKLIILPKYSLFELENGRRRLLASAGELQKGNELALPTQFMKFLYLASRYNESKGKPEEIEKKQEFVNQHVSYFDDILQLINDFSKRVILADANLEKINKLYQDNKENISVDELANNIINLFTFTSLGAPAAFKFFDKIIDRKRYTSTKEVLNSTLIHQSITGLYETRIDLGKLGED

SEQ ID NO: 89 - protein, 1365 aa, Streptococcus agalactiae
MNKPYSIGLDIGTNSVGWSIITDDYKVPAKKMRVLGNTDKEYIKKNLIGALLFDGGNTAADRRLKRTARRRYTRRRNRILYLQEIFAEEMSKVDDSFFHRLEDSFLVEEDKRGSKYPIFATLQEEKDYHEKFSTIYHLRKELADKKEKADLRLIYIALAHIIKFRGHFLIEDDSFDVRNTDISKQYQDFLEIFNTTFENNDLLSQNVDVEAILTDKISKSAKKDRILAQYPNQKSTGIFAEFLKLIVGNQADFKKYFNLEDKTPLQFAKDSYDEDLENLLGQIGDEFADLFSAAKKLYDSVLLSGILTVIDLSTKAPLSASMIQRYDEHREDLKQLKQFVKASLPEKYQEIFADSSKDGYAGYIEGKTNQEAFYKYLSKLLTKQEDSENFLEKIKNEDFLRKQRTFDNGSIPHQVHLTELKDIIRRQSEYYPFLKENQDRIEKILTFRIPYYIGPLAREKSDFAWMTRKTDDSIRPWNFEDLVDKEKSAEAFIHRMTNNDFYLPEEKVLPKHSLIYEKFTVYNELTKVRYKNEQGETYFFDSNIKQEIFDGVFKEHRKVSKKKLLDFLAKEYEEFRIVDVIGLDKENKAFNASLGTYHDLEKILDKDFLDNPDNESILEDIVQTLTLFEDREMIKKRLENYKDLFTESQLKKLYRRHYTGWGRLSAKLINGIRDKESQKTILDYLIDDGRSNRNFMQLINDDGLSFKSIISKAQAGSHSDNLKEVVGELAGSPAIKKGILQSLKIVDELVKVMGYEPEQIVVEMARENQTTNQGRRNSRQRYKLLDDGVKNLASNILKEYPTDNQALQNERLFLYYLQNGRDMYTGEALDIDNLSQYDIDHIIPQAFIKDDSIDNRVLVSSAKNRGKSDDVPSLEIVKDCKVFWKKLLDAKLMSQRKYDNLTKAERGGLTSDDKARFIQRQLVETRQITKHVARILDERFNNELDSKGRRIRKVKIVTLKSNLVSNFRKEFGFYKIREVNNYHHAHDAYLNAVVAKAILTKYPQLEPEFVYGDYPKYNSYKTRKATEKLFFYSNIMNFFKTKVTLADGTVVVKDDIEVNNDTGEIVWDKKKHFATVRKVLSYPQNNIVKKTEIQTGGFSKESILAHGNSDKLIPRKTKDIYLDPKKYGGFDSPIVAYSVLVVADIKKGKAQKLKTVTELLGITIMERSRFEKNPSAFLESKGYLNIRADKLIILPKYSLFELENGRRRLLASAGELQKGNELALPTQFMKFLYLASRYNESKGKPEEIEKKQEFVNQHVSYFDDILQLINDFSKRVILADANLEKINKLYQDNKENISVDELANNIINLFTFTSLGAPAAFKFFDKIVDRKRYTSTKEVLNSTLIHQSITGLYETRIDLGKLGED

SEQ ID NO: 90 - protein, 1365 aa, Streptococcus agalactiae
MNKPYSIGLDIGTNSVGWSIITDDYKVPAKKMRVLGNTDKEYIKKNLIGALLFDGGNTAADRRLKRTARRRYTRRRNRILYLQEIFAEEMSKVDDSFFHRLEDSFLVEEDKRGSKYPIFATMQEEKDYHEKFPTIYHLRKELADKKEKADLRLVYLALAHIIKFRGHFLIEDDRFDVRNTDIQKQYQAFLEIFDTSFENNHLLSQNVDVEAILTDKISKSAKKDRILAQYPNQKSTGIFAEFLKLIVGNQADFKKHFNLEDKTPLQFAKDSYDEDLENLLGQIGDEFADLFSAAKKLYDSVLLSGILTVTDLSTKAPLSASMIQRYDEHREDLKQLKQFVKASLPEKYQEIFADSSKDGYAGYIEGKTNQEAFYKYLSKLLTKQEDSEYFLEKIKNEDFLRKQRTFDNGSIPHQVHLTELKAIIRRQSEYYPFLKENQDKIEKILTFRIPYYVGPLARGNSDFAWMTRKTDDSIRPWNFEDLVDKEKSAEAFIHRMTNNDLYLPEEKVLPKHSLIYEKFTVYNELTKVRYKNEQGETYFFDSNVKQEIFDGVFKEHRKVSKKQLLDFLAKEFEEFRIVDVTGLDKENKAFNASLGTYHDLKKILDKDFLDNPDNESILEDIVQTITLFEDREMIKKRLENYKDLFTESQLKKLYRRHYTGWGRLSAKLINGIRDRESQKIILDYLISDGRANRNFMQLINDDGLSFKSIISKAQSGSHSDNLKEVVGELAGSPAIKKGILQSLKIVDELVKVMGYEPEQIVVEMARENQTTNQGRRNSRQRYKLLEDGVKNLASDILKEYPTDNQALQNERLFLYYLQNGRDMYTGEALDIDSLSQYDIDHIVPQAFIKDDSIDNRVLVSSAKNRGKSDDVPSIDIVKARKAFWKKLLDAKLISQRKYDNLTKAERGGLTPDDKAGFIQRQLVETRQITKHVARILDERFNNKVDDNNKPIRKVKIVTLKSNLVSNFRKEFGFYKIREVNNYHHAHDAYLNAVVAKAILTKYPQLEPEFVYGDYPKYNSYKTRKATEKLFFYSNIMNFFKTKVTLADETVVVKDDIEVNNETGEIAWDKKKHFATVRKVLSYPQVNIVKKTEVQTGGFSKESILAHSNSDKLIPRKTKDIYLDPKKYGGFDSPIVAYSVLVLADIKKGKAQKLKTVKELIGITIMERERFEKNPSAFLESKGYLNIRTDKLIILPKYSLFELENGRRRLLASAGELQKGNELALPTQYMKFLYLASRYNESKGKPEEIEKKQEFVNQHVSYFDDILQLINDFSKRVILADANLEKINKLYSDNKDNTPVDELAKNIINLFTFTSLGAPAAFKFFDKSVDRKRYTSTKEVLDSTLIHQSITGLYETRIDLGKLGED

SEQ ID NO: 91 - protein, 1365 aa, Streptococcus agalactiae
  SITE 9: note = misc_feature - Xaa can be any naturally occurring amino acid
MNKPYSIGXDIGTNSVGWSIITDDYKVPAKKMRVLGNTDKEYIKKNLIGALLFDGGNTAADRRLKRTARRRYTRRRNRILYLQEIFAEEMSKVDDSFFHRLEDSFLVEEDKRGSKYPIFATLQEEKDYHEKFSTIYHLRKELADKKEKADLRLIYIALAHIIKFRGHFLIEDDSFDVRNTDISKQYQDFLEIFNTTFENNDLLSQNVDVEAILTDKISKSAKKDRILAQYPNQKSTGIFAEFLKLIVGNQADFKKYFNLEDKTPLQFAKDSYDEDLENLLGQIGDEFADLFSAAKKLYDSVLLSGILTVIDLSTKAPLSASMIQRYDEHREDLKQLKQFVKASLPEKYQEIFADSSKDGYAGYIEGKTNQEAFYKYLSKLLTKQEDSENFLEKIKNEDFLRKQRTFDNGSIPHQVHLTELKAIIRRQSEYYPFLKENQDRIEKILTFRIPYYIGPLAREKSDFAWMTRKTDDSIRPWNFEDLVDKEKSAEAFIHRMTNNDFYLPEEKVLPKHSLIYEKFTVYNELTKVRYKNEQGETYFFDSNIKQEIFDGVFKEHRKVSKKKLLDFLAKEYEEFRIVDVIGLDKENKAFNASLGTYHDLEKILDKDFLDNPDNESILEDIVQTLTLFEDREMIKKRLENYKDLFTESQLKKLYRRHYTGWGRLSAKLINGIRDKESQKTILDYLIDDGRSNRNFMQLINDDGLSFKSIISKAQAGSHSDNLKEVVGELAGSPAIKKGILQSLKIVDELVKVMGYEPEQIVVEMARENQTTNQGRRNSRQRYKLLDDGVKNLASNILKEYPTDNQALQNERLFLYYLQNGRDMYTGEALDIDNLSQYDIDHIIPQAFIKDDSIDNRVLVSSAKNRGKSDDVPSLEIVKDCKVFWKKLLDAKLMSQRKYDNLTKAERGGLTSDDKARFIQRQLVETRQITKHVARILDERFNNELDSKGRRIRKVKIVTLKSNLVSNFRKEFGFYKIREVNNYHHAHDAYLNAVVAKAILTKYPQLEPEFVYGDYPKYNSYKTRKATEKLFFYSNIMNFFKTKVTLADGTVVVKDDIEVNNDTGEIVWDKKKHFATVRKVLSYPQNNIVKKTEIQTGGFSKESILAHGNSDKLIPRKTKDIYLDPKKYGGFDSPIVAYSVLVVADIKKGKAQKLKTVTELLGITIMERSRFEKNPSAFLESKGYLNIRADKLIILPKYSLFELENGRRRLLASAGELQKGNELALPTQFMKFLYLASRYNESKGKPEEIEKKQEFVNQHVSYFDDILQLINDFSKRVILADANLEKINKLYQDNKENISVDELANNIINLFTFTSLGAPAAFKFFDKIVDRKRYTSTKEVLNSTLIHQSITGLYETRIDLGKLGED

SEQ ID NO: 92 - protein, 1365 aa, Streptococcus agalactiae
MNKPYSIGLDIGTNSVGWSIITDDYKVPAKKMRVLGNTDKEYIKKNLIGALLFDGGNTAADRRLKRIARRRYTRRRNRILYLQEIFAEKMSKVDDSFFHRLEDSFLVEEDKRGSKYPIFATLQEEKDYHEKFPTIYHLRKELADKKEKADLRLVYLALAHIIKFRGHFLIEDDRFDVRNTDIQKQYQAFLEIFDTTFENNHLLSQNVDVEAILTDKISKSAKKDRILAQYPDQKSTGIFAEFLKLIVGNQADFKKHFNLEDKTPLQFAKDSYDEDLENLLGQIGDEFADLFSAAKKLYDSVLLSGILTVTDLSTKAPLSASMIQRYDEHREDLKQLKQFVKASLPEKYQEIFADSSKDGYAGYIEGKTNQEAFYKYLSKLLTKQEGSEYLLEKIKNEDFLRKQRTFDNGSIPHQVHLTELRAIIRRQSEYYPFLKENLDRIEKILTFRIPYYVGPLAREKSDFAWMTRKTDDSIRPWNFEELVDKEASAEAFIHCMTNNDLYLPEEKVLPKHSLIYEKFTVYNELTKVRYKNEQGETYFFDSNIKQEIFDGVFKEYRKVSKKQLLDFLAKEFEEFRIVDVTGLDKENKAFNASLGTYHDLEKILGKDFLDNPDNESILEDIVQTLTLFEDREMIKKRLDIYKDFFTESQLKKLYRRHYTGWGRLSAKLINGIRNKENQKTILDYLIDDGSANRNFMQLIKDAGLSFKSIISKAQSGSHSDNLKEVVSELAGSPAIKKGILQSLKIVDELVKVMGYKPEQIVVEMARENQTTNQGRRNSRQRYKLLDDGVRNLASNILKEYPTDNQALQNERLFLYYLQNGRDMYTEKALDIDNLSQYDIDHIIPQAFIKDDSIDNRVLVSSAKNRGKSDDVPSLEIVKDCKVFWKKLLDAKLMSQRKYDNLTKAERGGLTSDDKARFIQRQLVETRQITKHVARILDERFNNELDSKGRRIRKVKIVTLKSNLVSNFRKEFGFYKIREVNDYHHAHDAYLNAVVAKAILTKYPQLEPEFVYGDYPKYNSYKTRKATEKLFFYSNIMNFFKTKVTLADGTVVVKDDIEVNNDTGEIVWDKKKHFATVRKVLSYPQNNIVKKTEIQTGGFSKESILAHGNSDKLIPRKTKDIYLDPKKYGGFDSPIVAYSVLVVADIKKGKAQKLKTVTELLGITIMERSRFEKNPSAFLESKGYLNIRTDKLIILPKYSLFELENGRRRLLASAGELQKGNELALPTQFMKFLYLASRYNESKGKPEEIEKKQEFVNQHVSYFDDILQIINDFSNRVILADANLEKINKLYQDNKENISVDELANNIINLFTFTSLGAPAAFKFFDKIVDRKRYTSTKEVLNSTLIHQSITGLYETRIDLGKLGED

SEQ ID NO: 93 - protein, 1351 aa, Streptococcus anginosus
MNQKYSIGLDIGTNSVGWAVITDDYKVPAKKMKVLGNTDKQSIKKNLLGALLFDSGETAEATRLKRTARRRYTRRRNRLRYLQEIFAEEMMQVDESFFQRLDDSFLVDEDKRGERHPIFGNIAAEVKYHDEFPTIYHLRKHLADISQKADLRLVYLALAHMIKFRGHFLIEGQLKAENTNVQALFKDFVEVYDKTVEESHLSEITVDALSILTEKVSKSRRLENLIAHYPAEKKNTLFGNLIALFLGLQPNFKTNFQLSEDAKLQFSKDTYEEDLEGLLGEVGDEYADLFASAKNLYDAILLSGILTVDDNSTKAPLSASMVKRYEEHQKDLKKFEDFIKVNALDQYNAIFKDKNKKGYAGYIESGVKQDEFYKYLKGILLQINGSGDFLDKIDREDFLRKQRTFDNGSIPHQIHLQEMHAILRRQGEHYPFLKENQDKIEKILTFRIPYYVGPLARKGSRFAWAEYKADEKITPWNFDDILDKEKSAEKFITRMTLNDLYLPEEKVLPKHSLLYETFTVYNELTKVKYVNEQGEAKFFDANMKQEIFDHVFKENRKVTKDKLLNYLNKEFEEFRIVNLTGLDKENKVFNSSLGTYHDLRKILNKSFLDNKENAQIIEDIIQTLTLFEDREMIRQRLQKYSDIFTKAQLKKLERRHYTGWGRLSYKLINGIRNKENKKTILDYLIDDGYANRNFMQLINDDALSFKEEIAKAQIIGDVDDIANVVHDLPGSPAIKKGILQSVKIVDELVKVMGHNPANIIIEMARENQTTDRGRRNSQQRLKLLQDSLKPVNIKNVENQQLQNDRLFLYYIQNGKDMYTGETLDINNLSQYDIDHIIPQAYIKDDSFDNRVLTSSSENRGKSDNVPSIEVVCARKADWMRLRKAGLISQRKFDNLTKAERGGLTENDKAGFIKRQLVETRQITKHVAQVLDARFNAKHDENKKVIRDVKIITLKSNLVSQFRKDFKFYKVREINDYHHAHDAYLNAVIGTALLKKYPKLASEFVYGEFKKYDVSDKEIGKATAKYFFYSNLMNFFKKEVKFADGTVVERPDIETSEDGEIAWNKQTDFKIVRKVLSYPQVNIVKKTEVQTHGLDRPSPKPKPDSSENLVGVKRNLDPKKYGGYAGISNSYAVLVKAIIEKGVKKKETMVLEFQGISILDRITFEKDKRAFLLGKGYKDIKKIIELPKYSLFELKDGSRRMLASRGEIHKGNELFVPQKFTTLLYHAKRINNPINKDHIEYVKKHRDDFKELLNYVLEFNEKYVGATKNGERLKEAVADFDSKSNEEICTSFLGLFELTSLGSASDFEFLGVKIPRYRDYTPSSLLKDSTLIHQSITGLYETRIDLSKLGED

SEQ ID NO: 94 - protein, 1341 aa, Streptococcus anginosus
MKKEYSIGLDIGTNSVGWAVITDDYKVPAKKMKVLGNTDKQSIKKNLLGALLFDSGETAEATRLKRTARRRYTRRKNRLRYLQEIFTEEMNKVDENFFQRLDDSFLVEEDKQGSKYPIFGTLKEEKEYHKKFKTIYHLREELANSKEKADLRLVYLALAHMIKFRGHFLYEGDLKAENTDVQALFKDFVEEYDKTIEESHLSEITVDALSILTEKVSKSSRLENLIAHYPTEKKNTLFGNLIALSLGLQPNFKTNFQLSEDAKLQFSKDTYEEDLEELLGEIGDEYADLFASAKNLYDAILLSGILAVDDNTTKAPLSASMVKRYEEHQKDLKKLKDFIKVNAPDQYNAIFKDKNKKGYAGYIESGVEQDEFYKYLKGILLKINGSGDFLDKIDCEDFLRKQRTFDNGSIPHQIHLQEMHAILRRQGEHYPFLKENQDKIEKILTFRIPYYVGPLARKGSRFAWAEYKADEKITPWNFDDILDKEKSAEKFITRMTLNDLYLPEEKVLPKHSPLYETFTVYNELTKVKYVNEQGEAKFFDTNMKQEIFDHVFKENRKVTKDKLLNYLNKEFEEFRIVNLTGLDKENKAFNSSLGTYHDLRKILDKSFLDDKANEKTIEDIIQTLTLFEDREMIRQRLQKYSDIFTKAQLKKLERRHYTGWGRLSYKLINGIRNKENKKTILDYLIDDGYANRNFMQLINDDALSFKEEIARAQIIGDVDDIANVVHDLPGSPAIKKGILQSVKIVDELVKVMGHNPANIIIEMARENQTTDKGRRNSQQRLKLLQDSLKPVNIKNVENQQLQNDRLFLYYIQNGKDMYTGETLDINNLSQYDIDHIIPQAFIKDNSLDNRVLTRSDKNRGKSDDVPSIEVVHEMKSFWSKLLSVKLITQRKFDNLTKAERGGLTEEDKAGFIKRQLVETRQITKHVAQILDERFNTEFDGAQRRIRNVKIITLKSNLVSNFRKEFELYKVREINDYHHAHDAYLNAVVGNALLLKYPQLEPEFVYGEYPKYNSYRSRKSATEKFLFYSNILRFFKKEDIQTNEDGEIAWNKEKHIKILRKVLSYPQVNIVKKTEEQTGGFSKESILPKGESDKLIPRKTKNSYWNPKKYGGFDSPVVAYSILVFADVEKGKSKKLRKVQDMVGITIMEKKRFEKNPVDFLEQRGYRNVRLEKIIKLPKYSLFELENKRRRLLASARELQKGNELVIPQRFTTLLYHSYQIEKNYEPEHREYVEKHKDEFKELLEYISVFSRKYVLADNNLTKIEMLFSKNKDAEVSSLAKSFISLLTFTAFGAPAAFNFFGENIDRKRYTSVTECLNATLIHQSITGLYETRIDLSKLGED

SEQ ID NO: 95 - protein, 1341 aa, Streptococcus anginosus
MKKEYSIGLDIGTNSVGWAVITDDYKVPAKKMKVLGNTDKQSIKKNLLGALLFDSGETAEATRLKRTARRRYTRRRNRLRYLQEIFAEEMMQVDESFFQRLDDSFLVEEDKRGSRYPIFGNIAAEVKYHDDFPTIYHLRKHLVDISQKADLRLVYLALAHMIKFRGHFLIEGQLKAENTNVQALFKDFVEVYDKTVEESHLSEMTVDALSILTEKVSKSRRLENLVECYPTEKKNTLFGNLIALSLGLQPNFKTNFQLSEDAKLQFSKDTYEEDLEGLLGEIGDEYADLFASAKNLYDAILLSGILAVDDNTTKAPLSASMVKRYEEHQKDLKKLKDFIKVNAPAQYDDIFKDETKNGYAGYIENGVKQDEFYKYLKNTLSKIDGSDYFLDKIDREDFLRKQRTFDNGSIPHQIHLQEMHAILRRQGEHYPFLKENQDKIEKILTFRIPYYVGPLARKGSRFAWAEYKADEKITPWNFDDILDKEKSAEKFITRMTLNDLYLPEEKVLPKHSPLYETFTVYNELTKVKYVNEQGEAKFFDTNMKQEIFDHVFKENRKVTKDKLLNYLNKEFEEFRIVNLTGLDKENKAFNASLGTYHDLRKILDKSFLDDKVNEKIIEDIIQTLTLFEDREMIRQRLQKYSDIFTTQQLKKLERRHYTGWGRLSYKLINGIRNKENKKTILDYLIDDGYANRNFMQLINDDALSFKEEIARAQIIGDVDDIANVVHDLPGSPAIKKGILQSVKIVDELVKVMGHNPANIIIEMARENQTTDKGRRNSQQRLKLLQDSLKPVNIKNVENQQLQNDRLFLYYIQNGKDMYTGETLDINNLSQYDIDHIIPQAFIKDNSLDNRVLTRSDKNRGKSDDVPSIEVVHEMKSFWSKLLSVKLITQRKFDNLTKAERGGLTEEDKAGFIKRQLVETRQITKHVAQILDERFNTEFDGAQRRIRNVKIITLKSNLVSNFRKEFELYKVREINDYHHAHDAYLNAVVGNALLLKYPQLEPEFVYGEYPKYNSYRSRKSATEKFLFYSNILRFFKKEDIQTNEDGEIAWNKEKHIKILRKVLSYPQVNIVKKTEEQTGGFSKESILPKGESDKLIPRKTKNSYWNPKKYGGFDSPVVAYSILVFADVEKGKSKKLRKVQDMVGITIMEKKRFEKHPVDFLEQRGYRNVRLEKIIKLPKYSLFELENKRRRLLASARELQKGNELVIPQRFTTLLYHSYRIEKDYEPEHREYVEKHKDEFKELLEYISVFSRKYVLADNNLTKIEMLFSKNKDAEVSSLAKSFISLLTFTAFGAPAAFNFFGENIDRKRYTSVTECLNATLIHQSITGLYETRIDLSKLGED

SEQ ID NO: 96 - protein, 1341 aa, Streptococcus anginosus; identical to SEQ ID NO: 94

SEQ ID NO: 97 - protein, 1360 aa, Streptococcus caballi
MTKKNYSIGLDIGTNSVGWAVITDDYKVPAKKMKVLGNTDKKYIKKNLLGALLFDSGETAEATRLKRTARRRYTRRKNRLRYLQDIFTEEMAKVDDSFFQRLDESFLTDNDKNFDSHPIFGNKAEEDAYHQKFPTIYHLRKHLADSTEKADLRLVYLALAHMIKFRGHFLIEGELNAENTDVQKLFTDFVGVYDRTFDDSHLSEITVDAASILTEKISKSRRLENLINNYPKEKKNTLFGNLIALALGLQPNFKTNFKLSEDAKLQFSKDTYEEDLEELLGKIGDDYADLFTSSKNLYDAILLSGILTVDDNSTKAPLSASMIKRYVEHHEDLEKLKEFIKANKSELYHDIFKDKTQNGYAGYIENGVKQDEFYKYLKGILTKINGSDYFLDKIEREDFLRKQRTFDNGSIPHQIHLQEMHAILRRQGDYYPFLKENQEEIEKILTFRIPYYVGPLARKDSRFAWAEYRSDEKITPWNFDKVIDKEKSAEKFITRMTLNDLYLPEEKVLPKHSHVYETFAVYNELTKVKYVNEQGKDSFFDSNMKQEIFDHVFKENRKVTKEKLLNYLDKEFPEYRIQDLVGLDKENKSFNASLGTYHDLKKILDKSFLDDKVNEEVIEDIIKTLTLFEDREMIQQRLQKYSDIFTKQQLKKLERRHYTGWGRLSYKLINGIRNKENNKTILDYLIDDGSANRNFMQLINDDALSFKQIIQEAQVVGDVDDIETVVHDLPGSPAIKKGILQSVKIVDELIKVMGDNPDNIVIEMARENQTTNRGRSQSQQRLKKLQNSLKPSYIEDKVENSHLQNDQLFLYYIQNGKDMYTGDELDIDHLSDYDIDHIIPQAFIKDDSIDNRVLTSSAKNRGKSDDVPSLGIVRARKAEWVRLYKSGLISKRKFDNLTKAERGGLTEADKAGFIKRQLVETRQITKHVAQILDARFNTERDENDKVIRDVKVITLKSNLVSQFRKEFKFYKVREINDYHHAHDAYLNAVVGTALLKKYPKLAPEFVYGEYKKYDVSSDDHSEMGKATAKYFFYSNLMNFFKRVIRYSNGKVIVRPVVEYSKDTGEIAWNKRTDFEKVRKVLSYPQVNIVKKVETQTGGFSKESILPKGDSDKLIPRKTKKVLWEPKKYGGFDSPTVAYSVLVVADVEKGKTKKLKTVKELVGISIMERSFFEKNPVEFLKNKGYQNVQEDKLMKLPKYSLFEFEGGRRRLLASATELQKGNEIMLSAHLVALLYHAHRIGNFNSAEHLKYVSEHKKEFEEVLSCVENFANVYVDVEKNLSKIRAAADSMDNFSIEEISDSFINLLTLTALGAPADFNFLGEKIPRKRYNSTKECLNATLIHQSITGLYETRIDLSKLGEE

SEQ ID NO: 98 - protein, 1355 aa, Streptococcus canis
MEKKYSIGLDIGTNSVGWAVITDDYKVPSKKFKVLGNTNRKSIKKNLMGALLFDSGETAEATRLKRTARRRYTRRKNRIRYLQEIFANEMAKLDDSFFQRLEESFLVEEDKKNERHPIFGNLADEVAYHRNYPTIYHLRKKLADSPEKADLRLIYLALAHIIKFRGHFLIEGKLNAENSDVAKLFYQLIQTYNQLFEESLDEIEVDAKGILSARLSKSKRLEKLIAVFPNEKKNGLFGNIIALALGLTPNFKSNFDLTEDAKLQLSKDTYDDDLDELLGQIGDQYADLFSAAKNLSDAILLSDILRSNSEVTKAPLSASMVKRYDEHHQDLALLKTLVRQQFPEKYAEIFKDDTKNGYAGYVGIGATQEEFYKFIKPILEKMDGAEELLAKLNRDDLLRKQRTFDNGSIPHQIHLKELHAILRRQEEFYPFLKENREKIEKILTFRIPYYVGPLARGNSRFAWLTRKSEEAITPWNFEEVVDKGASAQSFIERMTNFDEQLPNKKVLPKHSLLYEYFTVYNELTKVKYVTERMRKPEFLSGEQKKAIVDLLFKTNRKVTVKQLKEDYFKKIECFDSVEIIGVEDRFNASLGTYHDLLKIIKDKDFLDNEENEDILEDIVLTLTLFEDREMIEERLKTYAHLFDDKVMKQLKRRHYTGWGRLSRKMINGIRDKQSGKTILDFLKDGFSNRNFMQLIHDDSLTFKEEIEKAQVSGQGDSLHEQIADLAGSPAIKKGILQTVKIVDELVKVMGHKPENIVIEMARENQTTTKGLQQSRERKKRIEEGIKELESQILKENPVENTQLQNEKLYLYYLQNGRDMYVDQELDINRLSDYDVDHIVPQSFIKDDSIDNKVLTRSVENRGKSDNVPSEEVVKKMKNYWRQLLNAKLITQRKFDNLTKAERGGLSEADKAGFIKRQLVETRQITKHVARILDSRMNTKRDKNDKPIREVKVITLKSKLVSDFRKDFQLYKVRDINNYHHAHDAYLNAVVGTALIKKYPKLESEFVYGDYKVYDVSEQEIGKATAKRFFYSNIMNFFKTEVKLANGEIRKRPLIETNGETGEVVWNKEKDFATVRKVLAMPQVNIVKKTEVQTGGFSKESILSKRESAKLIPRKKGWDTRKYGGFGSPTVAYSILVVAKVEKGKAKKLKSVKVLVGITIMEKGSYEKDPIGFLEAKGYKDIKKELIFKLPKYSLFELENGRRRMLASELQKANELVLPQHLVRLLYYTQNISATTGSNNLGYIEQHREEFKEIFEKIIDFSEKYILKNKVNSNLKSSFDEQFAVSDSILLSNSFVSLLKYTSFGASGGFTFLDLDVKQGRLRYQTVTEVLDATLIYQSITGLYETRTDLSQLGGD

SEQ ID NO: 99 - protein, 1341 aa, Streptococcus constellatus
MGKPYSIGLDIGTNSVGWAVVTDDYKVPAKKMKVLGNTDKQSIKKNLLGALLFDSGETAEATRLKRTARRRYTRRKNRLRYLQEIFTGEMNKVDENFFQRLDDSFLVDEDKRGEHHPIFGNIAAEVKYHDDFPTIYHLRRHLADTSKKADLRLVYLALAHMIKFRGHFLYEGDLKAENTDVQALFKDFVEEYDKTIEESHLSEITVDALSILTEKVSKSSRLENLIAHYPTEKKNTLFGNLIALSLDLHPNFKTNFQLSEDAKLQFSKDTYEEDLEGFLGEVGDEYADLFASAKNLYDAILLSGILTVDDNSTKAPLSASMVKRYEEHQKDLKKLKDFIKVNAPDQYNAIFKDKNKKGYASYIESGVKQDEFYKYLKGILLKINGSGDFLDKIDREDFLRKQRTFDNGSIPHQIHLQEMHAILRRQGEHYPFLKENQDKIEKILTFRIPYYVGPLARKGSRFAWAEYKADEKITPWNFDDILDKEKSAEKFITRMTLNDLYLPEEKVLPKHSPLYEAFTVYNELTKVKYVNEQGEAKFFDTNMKQEIFDHVFKENRKVTKDKLLNYLNKEFEEFRIVNLTGLDKENKAFNSSLGTYHDLRKILDKSFLDDKANEKTIEDIIQTLTLFEDREMIRQRLQKYSDIFTKAQLKKLERRHYTGWGRLSYKLINGIRNKENKKTILDYLIDDGYANRNFMQLINDDALSFKEEIARAQIIDDVDDIANVVHDLPGSPAIKKGILQSVKIVDELVKVMGHNPANIIIEMARENQTTDKGRRNSQQRLKLLQDSLKPVNIKNVENQQLQNDRLFLYYIQNGKDMYTGETLDINNLSQYDIDHIIPQAFIKDNSLDNRVLTRSDKNRGKSDDVPSIEVVHEMKSFWSKLLSVKLITQRKFDNLTKAERGGLTEEDKAGFIKRQLVETRQITKHVAQILDERFNTEFDGNKRRIRNVKIITLKSNLVSNFRKEFELYKVREINDYHHAHDAYLNAVVGNALLLKYPQLEPEFVYGEYPKYNSYRSRKSATEKFLFYSNILRFFKKEDIQTNEDGEIAWNKEKHIKILRKVLSYPQVNIVKKTEEQTGGFSKESILPKGESDKLIPRKTKNSYWDPKKYGGFDSPVVAYSILVFADVEKGKSKKLRKVQDMVGITIMEKKRFEKNPVDFLEQRGYRNVRLEKIIKLPKYSLFELENKRRRLLASAKELQKGNELVIPQRFTTLLYHSYRIEKDYEPEHREYVEKHKDEFKELLEYISVFSRKYVLADNNLTKIEMLFSKNKDAEVSSLAKSFISLLTFTAFGAPAAFNFFGENIDRKRYTSVTECLNATLIHQSITGLYETRIDLSKLGED

SEQ ID NO: 100 - protein, 1355 aa, Streptococcus constellatus
MTQKYSIGLDIGTNSVGWAIVTDDYKVPAKKMKILGNTNKQYIKKNLLGALLFDSGETAKATRLKRTARRRYTRRKNRLRYLQEIFIEEMNKVDENFFQRLDDSFLVTEDKRGSKYPIFGTLKEEKEYYKEFETIYHLRKRLADSTGKVDLRLVYLALAHMIKFRGHFLIEGQLKAENTDVQTLFNDFVEVYDKTIEESHLAEITVDALSILTEKVSKSRRLENLVKCYPTEKKNTLFGNLIALSLGLQPNFKTNFQLSEDAKLQFSKDTYEEDLEELLGKIGDDYADLFTSAKNLYDTILLSGILAVDDNSTKALLSASMIKRYEEHQKDLKKLKDFIKVNAPAQYDDIFKDETKNGYAGYIENGVKQDEFYKYLKNTLSKIDGSGYFLDKIEREDFLRKQRTFDNGSIPHQIHLQEMHAILRRQGEHYPFLKENQDKIEKILTFRIPYYVGPLVRKGSRFAWAEYKADEKITPWNFDDILDKEKSAEKFITRMTLNDLYLPEEKVLPKHSLLYEIFTVYNELTKVKYVNEQGEAKFFDANMKQEIFDHVFKENPKVTKDKLLNYLDKEFDEFRIVDLTGLDKENKAFNASLGTYHDLRKILDKSFLDDKANEKTIEDIIQTLTLFEDREMIRQRLQKYSDIFTKAQLKKLERRHYTGWGRLSYKLINGIRNKENNKTILEYLVDDGYANRNFMQLINDDTLPFKQIIKDAQAIDDVDDIELIVHDLPGSPAIKKGILQSIKIVDELVKVMGYNPDNIVIEMARENQTTTKGRRNSQQRLKLLQDSLTPVSIKNVENQQLQNDRLFLYYIQNGKDMYTGEELDIHHLSDYDIDHIIPQAFIKDDSIDNRVLTSSAKNRGKSDNVPNLEVVCDRKADWIRLREAGLISQRKFDNLTKAERGGLTENDKAGFIHRQLVETRQITKHVAQILDARFNPKRDDNKKVIRDVKIITLKSNLVSQFRRDFKLYKVREINDYHHAHDAYLNAVVGTALLKKYPKLTSEFVYGEYKKYDVSDNDEIGKATAKYFFYSNLMNFFKTEVKFADGTVVERPDIETSEDGEIAWNKQTDFKIVRKVLSYPQVNIVKKVEKQTGRFSKESILPKGDSDKLIARKTKENYWDTKKYGGFDSPTVAYSVLVVADIKKGKAKKLKTVKELVGISIMERPFFEKNPIMFLESKGYRNIQKDKLIKLPKYSLFEFEGGRRRLLASAVELQKGNEMVLPQYLNNLLYHAHRIDNSDNSEHLKYITEHKEEFGKLLSYIENFAKSYVDVDKNLEKIQLAVEKIDSFSVKEISNSFIHLLTLTALGAPADFNFLGEKIPRKRYTSTKECLNATLIHQSITGLYETQTDLSKLGED

SEQ ID NO: 101 - protein, 1356 aa, Streptococcus dysgalactiae
MDKKYSIGLDIGTNSVGWAVITDDYKVPSKKFKVLGNTDRHSIKKNLIGALLFDSGETAEATRLKRTARRRYTRRKNRIRYLQEIFSSEMSKVDDSFFHRLEESFLVEEDKKHERHPIFGNIVDEVAYHEKYPTIYHLRKKLADSTDKADLRLIYLALAHMIKFRGHFLIEGDLNPDNSDMDKLFIQLVQTYNQLFEENINASRVDAKAILSARLSKSRRLENLIAQLPGEKRNGLFGNLIALSLGLTPNFKSNFDLAEDAKLQLSKDTYDDDLDNLLAQIGDQYADLFLAAKNLSDAILLSDILRVNSEITKAPLSASMIKRYDEHHQDLTLLKALVRQQLPEKYKEIFFDQSKNGYAGYIDGGASQEEFYKFIKPILEKMDGTEELLAKLNREDLLRKQRTFDNGSIPHQIHLGELHAILRRQEDFYPFLKDNREKIEKILTFRIPYYVGPLARGNSRFAWMTRKSEETITPWNFEEVVDKGASAQSFIERMTNFDKNLPNEKVLPKHSLLYEYFTVYNELTKVKYVTEGMRKPEFLSGKQKEAIVDLLFKTNRKVTVKQLKEDYFKKIECFDSVEISGVEDRFNASLGTYHDLLKIIKDKDFLDNEENEDILEDIVLTLTLFEDKEMIEERLKKYANLFDDKVMKQLKRRHYTGWGRLSRKLINGIRDKQSGKTILDFLKDGFANRNFMQLINDDSLTFKEAIQKAQVSGQGHSLHEQIANLAGSPAIKKGILQSVKVVDELVKVMGHKPENIVIEMARENQTTQKGQKNSRERMKRIEEGIKELGSQILKEHPVENTQLQNEKLYLYYLQNGRDMYVDQELDINRLSDYDVDHIVPQSFIKDDSIDNKILTRSDKNRGKSDNVPSEEVVKKMKNYWRQLLNAKLITQRKFDNLTKAERGGLSELDKAGFIKRQLVETRQITKHVAQILDSRMNTKYDENDKLIREVKVITLKSKLVSDFRKDFQFYKVREINNYHHAHDAYLNAVVGTALIKKYTKLESEFVYGDYKVYDVSEQEIGKATAKRFFYSNIMNFFKTEITLANGEIRKRPLIETNEETGEIVWDKGRDFATVRKVLSMPQVNIVKKTEVQTGALTNESIYARGSFDKLISRKHRFESSKYGGFGSPTVTYSVLVVAKSKVQDGKVKKIKTGKELIGMTLLDKLVFEKNPLKFIEDKGYGNVQIDKCIKLPKYSLFEFENGTRRMLASRGDLQKANEMFLPAKLVTLLYHAHKIESSKELEHEAYILDHYNDLYQLLSYIERFASLYVDVEKNISKVKELFSNIESYSISEICSSVINLLTLTASGAPADFKFLGTTIPRKRYGSPQSILSSTLIHQSITGLYETRIDLSQLGGD

SEQ ID NO: 102 - protein, 1356 aa, Streptococcus dysgalactiae
MDKKYSIGLDIGTNSVGWAVITDDYKVPSKKFKVLGNTDRHSIKKNLIGALLFDSGETAEATRLKRTARRRYTRRKNRIRYLQEIFSSEMSKVDDSFFHRLEESFLVEEDKKHERHPIFGNIVDEVAYHEKYPTIYHLRKKLADSTDKADLRLIYLALAHMIKFRGHFLIEGDLNPDNSDVDKLFIQLVQTYNQLFEEKINASGVDAKAILSARLSKSKRLENLIAQLPGEKKNGLFGNLIALSLGLTPNFKSNFDLAEDAKLQLSKDTYDDDLDNLLAQIGNQYADLFLAAKNLSDAILLSDILRVNSEITKAPLSASMIKRYDEHHQDLTLLKALVRQQLPEKYKEIFFDQSKNGYAGYIDGGASQEEFYKFIKPILEKMDGTEELLAKLNREDLLRKQRTFDNGSIPHQIHLGELHAILRRQEDFYPFLKDNREKIEKILTFRIPYYVGPLARGNSRFAWMTRKSEETITPWNFEEVVDKGASAQSFIERMTNFDKNLPNEKVLPKHSLLYEYFTVYNELTKVKYVTEGMRKPEFLSGKQKEAIVDLLFKTNRKVTVKQLKEDYFKKIECFDSVEISGVEDRFNASLGTYHDLLKIIKDKDFLDNEENEDILEDIVLTLTLFEDKEMIEERLKKYANLFDDKVMKQLKRRHYTGWGRLSRKLINGIRDKQSGKTILDFLKDGFANRNFMQLINDDSLTFKEAIQKAQVSGQGHSLHEQIANLAGSPAIKKGILQSVKVVDELVKVMGHKPENIVIEMARENQTTQKGQKNSRERMKRIEEGIKELGSQILKEHPVENTQLQNEKLYLYYLQNGRDMYVDQELDINRLSDYDVDHIVPQSFIKDDSIDNKVLTRSDKNRGKSDNVPSEEVVKKMKNYWRQLLNAKLITQRKFDNLTKAERGGLSELDKAGFIKRQLVETRQITKHVAQILDSRMNTKYDENDKLIREVKVITLKSKLVSDFRKDFQFYKVREINNYHHAHDAYLNAVVGTALIKKYPKLESEFVYGDYKVYDVSEQEIGKATAKRFFYSNIMNFFKTEITLANGEIRKRPLIETNEETGEIVWDKGRDFATVRKVLSMPQVNIVKKTEVQTGALTNESIYARGSFDKLISRKHRFESSKYGGFGSPTVTYSVLVVAKSKVQDGKVKKIKTGKELIGITLLDKLVFEKNPLKFIEDKGYGNVQIDKCIKLPKYSLFEFENGTRRMLASRGDLQKANEMFLPAKLVTLLYHAHKIESSKELEHEAYILDHYNDLYQLLSYIERFASLYVDVEKNISKVKELFSNIESYSISEICSSVINLLTLTASGAPADFKFLGTTIPRKRYGSPQSILSSTLIHQSITGLYETRIDLSQLGGD

SEQ ID NO: 103 - protein, 1356 aa, Streptococcus dysgalactiae
MDKKYSIGLDIGTNSVGWAVITDDYKVPSKKFKVLGNTDRHSIKKNLIGALLFDSGETAEATRLKRTARRRYTRRKNRIRYLQEIFSSEMSKVDDSFFHRLEESFLVEEDKKHERHPIFGNIVDEVAYHEKYPTIYHLRKKLADSTDKADLRLIYLALAHMIKFRGHFLIEGDLNPDNSDMDKLFIQLVQTYNQLFEENINASRVDAKAILSARLSKSRRLENLIAQLPGEKRNGLFGNLIALSLGLTPNFKSNFDLAEDAKLQLSKDTYDDDLDNLLAQIGDQYADLFLAAKNLSDAILLSDILRVNSEITKAPLSASMIKRYDEHHQDLTLLKALVRQQLPEKYKEIFFDQSKNGYAGYIDGGASQEEFYKFIKPILEKMDGTEELLAKLNREDLLRKQRTFDNGSIPHQIHLGELHAILRRQEDFYPFLKDNREKIEKILTFRIPYYVGPLARGNSRFAWMTRKSEETITPWNFEEVVDKGASAQSFIERMTNFDKNLPNEKVLPKHSLLYEYFTVYNELTKVKYVTEGMRKPEFLSGKQKEAIVDLLFKTNRKVTVKQLKEDYFKKIECFDSVEISGVEDRFNASLGTYHDLLKIIKDKDFLDNEENEDILEDIVLTLTLFEDKEMIEERLKTYAHLFDDKVMKQLKRRHYTGWGRLSRKLINGIRDKQSGKTILDFLKDGFANRNFIQLIHDDSLTFKEAIQKAQVSGQGHSLHEQIANLAGSPAIKKGILQSVKVVDELVKVMGHKPENIVIEMARENQTTQKGQKNSRERMKRIEEGIKELGSQILKEHPVENTQLQNEKLYLYYLQNGRDMYVDQELDINRLSDYDVDHIVPQSFIKDDSIDNKVLTRSDKNRGKSDDVPSEEVVKKMKNYWRQLLNAKLITQRKFDNLTKAERGGLSELDKAGFIKRQLVETRQITKHVAQILDSRMNTKYDENDKLIREVKVITLKSKLVSDFRKDFQFYKVREINNYHHAHDAYLNAVVGTALIKKYPKLESEFVYGDYKVYDVSEQEIGKATAKRFFYSNIMNFFKTEITLANGEIRKRPLIETNEETGEIVWNKGRDFATVRKVLSMPQVNIVKKTEVQTGALTNESIYARGSFDKLISRKHRFESSKYGGFGSPTVTYSVLVVAKSKVQDGKVKKIKTGKELIGITLLDKLVFEKNPLKFIEDKGYGNVQIDKCIKLPKYSLFEFENGTRRMLASRGDLQKANEMFLPAKLVTLLYHAHKIESSKELEHEAYILDHYNDLYQLLSYIERFASLYVDVEKNISKVKELFSNIESYSISEICSSVINLLTLTASGAPADFKFLGTTIPRKRYGSPQSILSSTLIHQSITGLYETRIDLSQLGGD

SEQ ID NO: 104 - protein, 1356 aa, Streptococcus dysgalactiae
MDKKYSIGLDIGTNSVGWAVITDDYKVPSKKFKVLGNTDRHSIKKNLIGALLFDSGETAEATRLKRTARRRYTRRKNRIRYLQEIFSSEMSKVDDSFFHRLEESFLVEEDKKHERHPIFGNIVDEVAYHEKYPTIYHLRKKLADSTDKADLRLIYLALAHMIKFRGHFLIEGDLNPDNSDMDKLFIQLVQTYNQLFEENINASRVDAKAILSARLSKSRRLENLIAQLPGEKRNGLFGNLIALSLGLTPNFKSNFDLAEDAKLQLSKDTYDDDLDNLLAQIGDQYADLFLAAKNLSDAILLSDILRVNSEITKAPLSASMIKRYDEHHQDLTLLKALVRQQLPEKYKEIFFDQSKNGYAGYIDGGASQEEFYKFIKPILEKMDGTEELLAKLNREDLLRKQRTFDNGSIPHQIHLGELHAILRRQEDFYPFLKDNREKIEKILTFRIPYYVGPLARGNSRFAWMTRKSEETITPWNFEEVVDKGASAQSFIERMTNFDKNLPNEKVLPKHSLLYEYFTVYNELTKVKYVTEGMRKPEFLSGKQKEAIVDLLFKTNRKVTVKQLKEDYFKKIECFDSVEISGVEDRFNASLGTYHDLLKIIKDKDFLDNEENEDILEDIVLTLTLFEDKEMIEERLKKYANLFDDKVMKQLKRRHYTGWGRLSRKLINGIRDKQSGKTILDFLKDGFANRNFMQLINDDSLTFKEAIQKAQVSGQGHSLHEQIANLAGSPAIKKGILQSVKVVDELVKVMGHKPENIVIEMARENQTTQKGQKNSRERMKRIEEGIKELGSQILKEHPVENTQLQNEKLYLYYLQNGRDMYVDQELDINRLSDYDVDHIVPQSFIKDDSIDNKVLTRSDKNRGKSDNVPSEEVVKKMKNYWRQLLNAKLITQRKFDNLTKAERGGLSELDKAGFIKRQLVETRQITKHVAQILDSRMNTKYDENDKLIREVKVITLKSKLVSDFRKDFQFYKVREINNYHHAHDAYLNAVVGTALIKKYPKLESEFVYGDYKVYDVSEQEIGKATAKRFFYSNIMNFFKTEITLANGEIRKRPLIETNEETGEIVWDKGRDFATVRKVLSMPQVNIVKKTEVQTGALTNESIYARGSFDKLISRKHRFESSKYGGFGSPTVTYSVLVVAKSKVQDGKVKKIKTGKELIGITLLDKLVFEKNPLKFIEDKGYGNVQIDKCIKLPKYSLFEFENGTRRMLASRGDLQKANEMFLPAKLVTLLYHAHKIESSKELEHEAYILDHYNDLYQLLSYIERFASLYVDVEKNISKVKELFSNIESYSISEICSSVINLLTLTASGAPADFKFLGTTIPRKRYGSPQSILSSTLIHQSITGLYETRIDLSQLGGD

SEQ ID NO: 105 - protein, 1356 aa, Streptococcus dysgalactiae
MDKKYSIGLDIGTNSVGWAVITDDYKVPSKKFKVLGNTDRHSIKKNLIGALLFDSGETAEATRLKRTARRRYTRRKNRIRYLQEIFSSEMSKVDDSFFHRLEESFLVEEDKKHERHPIFGNIVDEVAYHEKYPTIYHLRKKLADSTDKADLRLIYLALAHMIKFRGHFLIEGDLNPDNSDMDKLFIQLVQTYNQLFEENINASRVDAKAILSARLSKSRRLENLIAQLPGEKRNGLFGNLIALSLGLTPNFKSNFDLAEDAKLQLSKDTYDDDLDNLLAQIGDQYADLFLAAKNLSDAILLSDILRVNSEITKAPLSASMIKRYDEHHQDLTLLKALVRQQLPEKYKEIFFDQSKNGYAGYIDGGASQEEFYKFIKPILEKMDGTEELLAKLNREDLLRKQRTFDNGSIPHQIHLGELHAILRRQEDFYPFLKDNREKIEKILTFRIPYYVGPLARGNSRFAWMTRKSEETITPWNFEEVVDKGASAQSFIERMTNFDKNLPNEKVLPKHSLLYEYFTVYNELTKVKYVTEGMRKPEFLSGKQKEAIVDLLFKTNRKVTVKQLKEDYFKKIECFDSVEISGVEDRFNASLGTYHDLLKIIKDKDFLDNEENEDILEDIVLTLTLFEDKEMIEERLKTYAHLFDDKVMKQLKRRHYTGWGRLSRKLINGIRDKQSGKTILDFLKDGFANRNFIQLIHDDSLTFKEAIQKAQVSGQGHSLHEQIANLAGSPAIKKGILQSVKVVDELVKVMGHKPENIVIEMARENQTTQKGQKNSRERMKRIEEGIKELGSQILKEHPVENTQLQNEKLYLYYLQNGRDMYVDQELDINRLSDYDVDHIVPQSFIKDDSIDNKVLTRSDKNRGKSDDVPSEEVVKKMKNYWRQLLNAKLITQRKFDNLTKAERGGLSELDKAGFIKRQLVETRQITKHVAQILDSRMNTKYDENDKLIREVKVITLKSKLVSDFRKDFQFYKVREINNYHHAHDAYLNAVVGTALIKKYPKLESEFVYGDYKVYDVSEQEIGKATAKRFFYSNIMNFFKTEITLANGEIRKRPLIETNEETGEIVWDKGRDFATVRKVLSMPQVNIVKKTEVQTGALTNESIYARGSFDKLISRKHRFESSKYGGFGSPTVTYSVLVVAKCKVQDGKVKKIKTGKELIGITLLDKLVFEKNPLKFIEDKGYGNVQIDKCIKLPKYSLFEFENGTRRMLASRGDLQKANEMFLPAKLVTLLYHAHKIESSKELEHEAYILDHYNDLYQLLSYIERFASLYVDVEKNISKVKELFSNIESYSISEICSSVINLLTLTASGAPADFKFLGTTIPRKRYGSPQSILSSTLIHQSITGLYETRIDLSQLGGD

SEQ ID NO: 106 - protein, 1356 aa, Streptococcus dysgalactiae
MDKKYSIGLDIGTNSVGWAVITDDYKVPSKKFKVLGNTDRHSIKKNLIGALLFDSGETAEATRLKRTARRRYTRRKNRIRYLQEIFSSEMSKVDDSFFHRLEESFLVEEDKKHERHPIFGNIVDEVAYHEKYPTIYHLRKKLADSTDKADLRLIYLALAHMIKFRGHFLIEGDLNPDNSDVDKLFIQLVQTYNQLFEENINASRVDAKAILSARLSKSRRLENLIAQLPGEKRNGLFGNLIALSLGLTPNFKSNFDLAEDAKLQLSKDTYDDDLDNLLAQIGDQYADLFLAAKNLSDAILLSDILRVNSEITKAPLSASMIKRYDEHHQDLTLLKALVRQQLPEKYKEIFFDQSKNGYAGYIDGGASQEEFYKFIKPILEKMDGTEELLAKLNREDLLRKQRTFDNGSIPHQIHLGELHAILRRQEDFYPFLKDNREKIEKILTFRIPYYVGPLARGNSRFAWMTRKSEETITPWNFEEVVDKGASAQSFIERMTNFDKNLPNEKVLPKHSLLYEYFTVYNELTKVKYVTEGMRKPAFLSGEQKKAIVDLLFKTNRKVTVKQLKEDYFKKIECFDSVEISGVEDRFNASLGTYHDLLKIIKDKDFLDNEENEDILEDIVLTLTLFEDKEMIEERLKTYAHLFDDKVMKQLKRRHYTGWGRLSRKLINGIRDKQSGKTILDFLKDGFANRNFIQLIHDDSLTFKEAIQKAQVSGQGHSLHEQIANLAGSPAIKKGILQSVKVVDELVKVMGHKPENIVIEMARENQTTQKGQKNSRERMKRIEEGIKELGSQILKEHPVENTQLQNEKLYLYYLQNGRDMYVDQELDINRLSDYDVDHIVPQSFIKDDSIDNKVLTRSDKNRGKSDNVPSEEVVKKMKNYWRQLLNAKLITQRKFDNLTKAERGGLSELDKAGFIKRQLVETRQITKHVAQILDSRMNTKYDENDKLIREVKVITLKSKLVSDFRKDFQFYKVREINNYHHAHDAYLNAVVGTALIKKYPKLESEFVYGDYKVYDVSEQEIGKATAKRFFYSNIMNFFKTEITLANGEIRKRPLIETNEETGEIVWDKGRDFATVRKVLSMPQVNIVKKTEVQTGALTNESIYARGSFDKLISRKHRFESSKYGGFGSPTVTYSVLVVAKSKVQDGKVKKIKTGKELIGITLLDKLVFEKNPLKFIEDKGYGNVQIDKCIKLPKYSLFEFENGTRRMLASRGDLQKANEMFLPAKLVTLLYHAHKIESSKELEHEAYILDHYNDLYQLLSYIERFASLYVDVEKNISKVKELFSNIESYSISEICSSVINLLTLTASGAPADFKFLGTTIPRKRYGSPQSILSSTLIHQSITGLYETRIDLSQLGGD

SEQ ID NO: 107 - protein, 1345 aa, Streptococcus equi
MKKPYTIALDIGTNSVGWVVVTDDYRVPTKKMKVLGNTERKTIKKNLIGALLFDSGDTAEGTRLKRTARRRYTRRKNRLRYLKEIFTEEMAKVDDGFFQRLEDSFYVLEDKEGNKHPIFANLADEVAYHKKYPTIYHLRKELVDNPQKADLRLIYLAVAHIIKFRGHFLIEGTLSSKNNNLQKSFDHLVDTYNLLFEEQLLTEGINAKELLSAALSKSKRLENLISLIPGQKKTGIFGNIIALSLGLTPNFKANFGLSKDVKLQLAKDTYADDLDSLLAQIGDQYADLFLAAKNLSDAILLSDILTESDEITRAPLSASMVKRYREHHKDLVTLKTLIKDQLPEKYQEIFLDKTKNGYAGYIEGQVSQEEFYKYLKPILARLDGSEPLLLKIDREDFLRKQRTFDNGSIPHQIHLEELHAILRRQEVFYPFLKDNRKKIESLLTFRIPYYVGPLARGHSRFAWVKRKFDGAIRPWNFEEIVDEEASAQIFIEKMTKNDLYLPNEKVLPKHSLLYETFTVYNELTKVKYATEGMTRPQFLSADQKQAIVDLLFKTNRKVTVKQLKENYFKKIECWDSVEITGVEDSFNASLGTYHDLLKIIQDKDFLDNPDNQKIIEDIILTLTLFEDKKMISKRLDQYAHLFDKVVLNKLERHHYTGWGRLSGKLINGIRDKQSGKTILDFLKDGFANRNFMQLIHDSELSFIDEIAKAQVIGKTEYSKDLVGNLAGSPAIKKGISQTIKIVDELVKIMGYLPQQIVIEMARENQTTAQGIKNARQRMRKLEETAKKLGSNILKEHPVDNSQLQNDKRYLYYLQNGKDMYTGDDLDIDYLSSYDIDHIIPQSFIKNNSIDNKVLTSQGANRGKLDNVPSEAIVRKMKGYWQSLLRAGAISKQKFDNLTKAERGGLTQVDKAGFIQRQLVETRQITKHVAQILDSRFNTEFDDHNKRIRKVHIITLKSKLVSDFRKEFGLYKIRDINHYHHAHDAYLNAVVAKAILGKYPQLAPEFVYGDYPKYNSFKERQKATQKMLFYSNILKFFKDQESLHVNSDGEEIWNANKHLPIIKNVLSIPQVNIVKKTEVQTGGFYKESILSKGNSDKLIPRKNNWDTRKYGGFDSPTVAYSVLVIAKMEKGKAKVLKPVKEMVGITIMERTAFEENPVVFLEARGYREIQEHLIIKLPKYSLFELENGRRRLLASSELQKGNELFLPVDYMTFLYLAAHYHELTGSSEDVLRKKYFVDRHLHYFDDIIQMINDFAERHILASSNLEKINHTYHNNSDLPVNERAENIINVFTFVALGAPAAFKFFDATIDRKRYTSTKEVLNATLIHQSVTGLYETRIDLSQLGEN

SEQ ID NO: 108 - protein, 1345 aa, Streptococcus equi
MKKPYTIALDIGTNSVGWVVVTDDYRVPTKKMKVLGNTERKTIKKNLIGALLFDSGDTAEGTRLKRTARRRYTRRKNRLRYLKEIFTEEMAKVDDGFFQRLEDSFYVLEDKEGNKHPIFANLADEVAYHKKYPTIYHLRKELVDNPQKADLRLIYLAVAHIIKFRGHFLIEGTLSSKNNNLQKSFDHLVDTYNLLFEEQLLTEGINAKELLSAALSKSKRLENLISLIPGQKKTGIFGNIIALSLGLTPNFKANFGLSKDVKLQLAKDTYADDLDSLLAQIGDQYADLFLAAKNLSDAILLSDILTESDEITRAPLSASMVKRYREHHKDLVTLKTLIKDQLPEKYQEIFLDKTKNGYAGYIEGQVSQEEFYKYLKPILARLDGSEPLLLKIDREDFLRKQRTFDNGSIPHQIHLEELHAILRRQEVFYPFLKDNRKKIESLLTFRIPYYVGPLARGHSRFAWVKRKFDGAIRPWNFEEIVDEEASAQIFIEKMTKNDLYLPNEKVLPKHSLLYETFTVYNELTKVKYATEGMTRPQFLSADQKQAIVDLLFKTNRKVTVKQLKENYFKKIECWDSVEITGVEDSFNASLGTYHDLLKIIQDKDFLDNPDNQKIIEDIILTLTLFEDKKMISKRLDQYAHLFDKVVLNKLERHHYTGWGRLSGKLINGIRDKQSGKTILDFLKDGFANRNFMQLIHDSELSFIDEIAKAQVIGKTEYSKDLVGNLASSPAIKKGISQTIKIVDELVKIMGYLPQQIVIEMARENQTTAQGIKNARQRMRKLEETAKKLGSNILKEHPVDNSQLQNDKRYLYYLQNGKDMYTGDDLDIDYLSSYDIDHIIPQSFIKNNSIDNKVLTSQGANRGKLDNVPSEAIVRKMKGYWQSLLRAGAISKQKFDNLTKAERGGLTQVDKAGFIQRQLVETRQITKHVAQILDSRFNTEFDDHNKRIRKVHIITLKSKLVSDFRKEFGLYKIRDINHYHHAHDAYLNAVVAKAILGKYPQLAPEFVYGDYPKYNSFKERQKATQKTLFYSNILKFFKDQESLHVNSDGEEIWNANKHLPIIKNVLSIPQVNIVKKTEVQTGGFYKESILSKGNSDKLIPRKNNWDTRKYGGFDSPTVAYSVLVIAKMEKGKAKVLKPVKEMVGITIMERIAFEENPVVFLEAKGYREIQEHLIIKLPKYSLFELENGRRRLLASSELQKGNELFLPVDYMTFLYLAAHYHELTGSSEDVLRKKYFVERHLHYFDDIIQMINDFAERHILASSNLEKINHTYHNNSDLPINERAENIINVFTFVALGAPAAFKFFDATIDRKRYTSTKEVLNATLIHQSVTGLYETRIDLSQLGEN

SEQ ID NO: 109 - protein, 1345 aa, Streptococcus equi
MKKPYTIALDIGTNSVGWVVVTDDYRVPTKKMKVLGNTERKTIKKNLIGALLFDSGDTAEGTRLKRTARPRYTRRKNRLRFLKEIFTEEMAKVDDGFFQRLEDSFYVLEDKEGNKHPIFANLADEVAYHKKYPTIYHLRKELVDNPQKADLRLIYLAVAHIIKFRGHFLIEGTLSSKNNNLQKSFDHLVDTYNLLFEEQLLTEGINAKELLSAALSKSKRLENLISLIPGQKKTGIFGNIIALSLGLTPNFKANFGLSKDVKLQLAKDTYADDLDSLLAQIGDQYADLFLAAKNLSDAILLSDILTESDEITRAPLSASMVKRYREHHKDLVTLKTLIKDQLPEKYQEIFLDKTKNGYAGYIEGQVSQEEFYKYLKPILARLDGSEPLLLKIDREDFLRKQRTFDNGSIPHQIHLEELHAILRRQEVFYPFLKDNRKKIESLLTFRIPYYVGPLARGHSRFAWVKRKFDGAIRPWNFEEIVDEEASAQIFIEKMTKNDLYLPNEKVLPKHSLLYETFTVYNELTKVKYATEGMTRPQFLSADQKQAIVDLLFKTNRKVTVKQLKENYFKKIECWDSVEITGVEDSFNASLGTYHDLLKIIQDKDFLDNPDNQKIIEDIILTLTLFEDKKMISKRLDQYAHLFDKVVLNKLERHHYTGWGRLSGKLINGIRDKQSGKTILDFLKDGFANRNFMQLIHDSELSFIDEIAKAQVIGKTEYSKDLVGNLAGSPAIKKGISQTIKIVDELVKIMGYLPQQIVIEMARENQTTAQGIKNARQRMRKLEETAKKLGSNILKEHPVDNSQLQNDKRYLYYLQNGKDMYTGDDLDIDYLSSYDIDHIIPQSFIKNNSIDNKVLTSQGANRGKLDNVPSEAIVRKMKGYWQSLLRAGAISKQKFDNLTKAERGGLTQVDKAGFIQLQLVETRQITKHVAQILDSRFNTEFDDHNKRIRKVHIITLKSKLVSDFRKEFGLYKIRDINHYHHAHDAYLNAVVAKAILGKYPQLAPEFVYGDYPKYNSFKERQKATQKTLFYSNILKFFKDQESLHVNSDGEEIWNANKHLPIIKNVLSIPQVNIVKKTEVQTGGFYKESILSKGNSDKLIPRKNNWDTRKYGGFDSPTVAYSVLVIAKMEKGKAKVLKPVKEMVGITIMERIAFEENPVVFLEAKGYREIQEHLIIKLPKYSLFELENGRRRLLASSELQKGNELFLPVDYMTFLYLAAHYHELTGSSEDVLRKKYFVERHLHYFDDIIQMINDFAERHILASSNLEKINHTYHNNSDLPVNERAENIINVFTFVALGAPAAFKFFDATIDRKRYTSTKEVLNATLIHQSVTGLYETRIDLSQLGEN

SEQ ID NO: 110 - protein, 1360 aa, Streptococcus equinus
MEKTYSIGLDIGTNSVGWAVITDDYKVPAKKMKVLGNTDKKYIKKNLLGALLFDSGETAEATRLKRAARRRYTRRKNRLRYLQEIFAKEMAKVDESFFQRLEESFLTDDDKTFDSHPIFGNKAEEDTYHQEFPTIYHLRKHLADSPEKVDLRLVYLALAHMIKFRGHFLIEGQLNAENTDVQKIFADFVGVYDRTFDDSHLSEITVDAASILTEKISKSRRLENLIKQYPTEKKNTLFGNLVALALGLQPNFKTNFKLSEDAKLQFSKDTYDEDLEELLGKIGDDYADLFTAAKNLYDAILLSGILTVDDNSTKAPLSASMIKRYEEHHEDLEKLKTFIKVNNFDKYHEIFKDKSKNGYAGYIENGVKQDIFYKHLKSIISEKNGGQYFLDKIEREDFLRKQRTFDNGSIPYQIHLQEMRTILRRQGEYYPFLKENQAKIEKILTFRIPYYVGPLARKNSRFAWAKYHSDEPITPWNFDEVVDKEKSAEKFITRMTLNDLYLPEEKVLPKHSYVYETFAVYNELTKIKYVNEQGKSFFFDANMKQEIFDHVFKENRKVTKAKLLSYLNNEFEEFRINDLIGLDKDSKSFNASLGTYHDLKKILDKSFLDDKTNEQIIEDIVLTLTLFEDRDMIHERLQKYSDIFTSQQLKKLERRHYTGWGRLSYKLINGIRNKENNKTILDFLIDDGDANRNFMQLINDDSLSFKTTIQEAQVVGDVDDIEAVVHDLPGSPAIKKGILQSVKIVDELVKVMGHNPQNIVIEMARENQITGYGRNRSNQRLKRLQDSLKPSYVDSKVENSHLQNDRLFLYYIQNGKDMYTGEELDIDHLSDYDIDHIIPQAFIKDNSIDNRVLTSSAKNRGKSDDVPSIEIVRNRKSYWYKLYKSGLISKRKFDNLTKAERGGLTETDKAGFIKRQLVETRQITKHVAQILDARFNTKCDENDKVIRDVKVITLKSSLVSQFRKEFKFYKVREINDYHHAHDAYLNAVVGTALLKKYPKLAPEFVYGEYKKYDVSSDNHSELGKATAKYFFYSNLMNFFKTEVKYADGRVFERPDIETNADGEVVWNKQRDFNIVRKVLSYPQVNIVKKVEVQTGGFSKESILPKGDSDKLIPRKTKKLQWETQKYGGFDSPTVAYSVLVVADVEKGKTRKLKTVKELVGISIMERSSFEENPVSFLEKKGYHNVQEDKLIKLPKYSLFEFEGGRRRLLASATELQKGNEVVLPQYMVNLLYHSQHVNNSHKPEHLNYVKQHKDEFKDIFNLIISIARINILKPKVVDNLINEFTEYGQEDISSLSESFINLLKFISFGAPGAFKFLKLDVKQSNLRYKSTTEALSATLIHQSVTGLYETRIDLSKLGEE

SEQ ID NO: 111 - protein, 1353 aa, Streptococcus gallolyticus
MTKKNYSIGLDIGTNSVGWAVITDDYKVPAKKMKVLGNTDKKYIKKNLLGALLFDSGETAEATRLKRTARRRYTRRKNRLRYLQEIFAEEMTKVDESFFYRLDESFLTTDEKDFERHPIFGNKAEEDAYHQKFPTIYHLRNYLADSSEKADLRLVYLALAHMIKYRGHFLIEGKLNAENTDVQKLFTDFVGVYDRTFDDSHLSEITVDVASTLTEKISKSRRLENLIKYYPTEKKNTLFGNLIALALGLQPNFKMNFKLSEDAKLQFSKDTYEEDLEELLGKIGDDYADLFTSAKNLYDAILLSGILTVDDNSTKAPLSASMIKRYVEHHEDLEKLKEFIKANKSELYHDIFKDKNKNGYAGYIENGVKQDEFYKYLKNTLSKIDGSDYFLDKIEREDFLRKQRTFDNGSIPHQIHLQEMHAILRRQGDYYPFLKEKQDRIEKILTFRIPYYVGPLVRKDSRFAWAEYRSDEKITPWNFDKVIDKEKSAEKFITRMTLNDLYLPEEKVLPKHSHVYETYAVYNELTKIKYVNEQGKESFFDSNMKQEIFDHVFKENRKVTKEKLLNYLNKEFPEYRIKDLIGLDKENKSFNASLGTYHDLKKILDKAFLDDKVNEEVIEDIIKTLTLFEDKDMIHERLQKYSDIFTANQLKKLERRHYTGWGRLSYKLINGIRNKENNKTILDYLIDDGSANRNFMQLINDDTLPFKQIIQKSQVVGDVDDIEAVVHDLPGSPAIKKGILQSVKIVDELVKVMGDNPDNIVIEMARENQTTNRGRSQSQQRLKKLQSSLKPSYIEDKVENSHLQNDQLFLYYIQNGKDMYTGDELDIDHLSDYDIDHIIPQAFIKDDSIDNRVLTSSAKNRGKSDDVPSLDIVRARKAEWVRLYKSGLISKRKFDNLTKAERGGLTEADKAGFIKRQLVETRQITKHVAQILDARFNTEHDENDKVIRDVKVITLKSNLVSQFRKDFEFYKVREINDYHHAHDAYLNAVVGTALLKKYPKLASEFVYGEYKKYDISSDKATAKYFFYSNLMNFFKTKVKYADGTVFERPIIETNADGEIAWNKQIDFEKVRKVLSYPQVNIVKKVETQTGGFSKESILPKGDSDKLIPRKTKKVYWDTKKYGGFDSPTVAYSVFVVADVEKGKAKKLKTVKELVGISIMERSFFEENPVEFLENKGYHNIREDKLIKLPKYSLFEFEGGRRRLLASASELQKGNEMVLPGYLVELLYHAHRADNFNSTEYLNYVSEHKKEFEKVLSCVEDFANLYVDVEKNLSKIRAVADSMDNFSIEEISNSFINLLTLTALGAPADFNFLGEKIPRKRYTSTKECLTATLIHQSITGLYETRIDLSKLGEE

SEQ ID NO: 112 - protein, 1354 aa, Streptococcus gallolyticus
MTEKNYSIGLDIGTNSVGWAVITDDYKVPAKKMKVLGNTDKKYIKKNLLGALLFDNGETAEATRLKRTARRRYTRRKNRLRYLQEIFAEEMAKVDESFFYRLDESFLTTDDKDFERHPIFGNKADEIKYHQEFPTIYHLRKHLADSHEKADLRLIYLALAHMIKFRGHFLIEGELNAENTDVQKLFEAFVEVYDRTFDDSNLSEITVDASSILTEKFSKSRRLENLIKHYPTEKKNTLFGNLVALALGLQPNFKTSFKLSEDAKLQFSKDTYEEDLEELIGKIGDEYADLFTSAKNLYDAILLSGILTVADNTTKAPLSASMIKRYNEHQVDLKKLKEFIKNNASDKYDEIFNDKDKNGYAGYIENGVKQDEFYKYLKTTLSKIDGSDYFLDKIEREDFLRKQRTFDNGSIPHQIHLQEMHAILRRQGEHYAFLKENQAKIEKILTFRIPYYVGPLARKNSRFAWAEYHSDEKITPWNFDEIIDKEKSAEKFITRMTLNDLYLPEEKVLPKHSLVYETYTVYNELTKVKYVNEQGKSNFFDANMKQEIFEHVFKENRKVTKDKFLNYLNKEFPEYRIQDLIGLDKENKSFNASLGTYHDLKKILDKSFLDDKTNETIIEDIIQTLTLFEDRDMIRQRLQKYSDIFTPQQLKKLERRHYTGWGRLSYKLINGIRNKENGKSILDYLIDDGYANRNFMQLISDDTLPFKQIIKDAQIIGDIDDVTSVVRELPGSPAIKKGILQSVKIVDELVKVMGHNPDNIVIEMARENQTTNRGRNQSQQRLKKLQDSLKPSYIEGKVENNHLQDDRLFLYYIQNGKDMYTGDELDIDHLSDYDIDHIIPQAFIKDDSIDNRVLTSSAKNRGKSDDVPSLDIVHDRKADWIRLYKSGLISKRKFDNLTKAERGGLTENDKAGFIKRQLVETRQITKHVAQILDSRFNTERDENDKVIRNVKVITLKSNLVSQFRKDFKFYKVREINDYHHAHDAYLNAVVGTALLKKYPKLAPEFVYGEYKKYDISGDKATAKYFFYSNLMNFFKRVIRYSNGKVVVRPVIECSKDTGEIAWNKQTDFEKVRRVLSYPQVNIVKKVETQTGGFSKESILPKGNSDKLIPRKTKKFRWDTPKYGGFDSPNIAYSVFVIADVEKGKAKKLKTVKELVGISIMERSSFEENPVVFLEKKGYQNVQEDNLIKLPKYSLFEFEGGRRRLLASASELQKGNEVVLSRHLVELLYHAHRVNSFNNSEHLKYVSEHKKEFGEVLSCVENFAKSYVDVEKNLGKIRAVADKIDTFSIEDISISFVNLLTLTALGAPADFNFLGEKIPRKRYTSTKECLNATLIHQSITGLYETRIDLSKLGEE

SEQ ID NO: 113 - protein, 1355 aa, Streptococcus gallolyticus; identical to SEQ ID NO: 12

SEQ ID NO: 114 - protein, 1358 aa, Streptococcus infantarius
MEKSYSIGLDIGTNSVGWAVITDDYKVPAKKMKVLGNTDKKYIKKNLLGALLFDSGETAEVTRLKRTARRRYTRRKNRLRYLQEIFAKEMTKVDESFFQRLEESFLTDDDKTFDSHPIFGNKAEEDAYHQKFPTIYHLRKYLADSQEKADLRLVYLALAHMIKYRGHFLIEGELNAENTDVQKLFNVFVETYDKIVDESHLSEIEVDASSILTEKVSKSRRLENLIKQYPTEKKNTLFGNLIALALGLQPNFKTNFKLSEDAKLQFSKDTYEEDLEELLGKVGDDYADLFISAKNLYDAILLSGILTVDDNSTKAPLSASMIKRYVEHHEDLEKLKEFIKINKLKLYHDIFKDKTKNGYAGYIDNGVKQDEFYKYLKTILTKIDDSDYFLDKIERDDFLRKQRTFDNGSIPHQIHLQEMHSILRRQGDYYPFLKENQAKIEKILTFRIPYYVGPLARKDSRFAWANYHSDEPITPWNFDEVVDKEKSAEKFITRMTLNDLYLPEEKVLPKHSHVYETFTVYNELTKIKYVNEQGESFFFDANMKQEIFDHVFKENRKVTKAKLLSYLNNEFEEFRINDLIGLDKDSKSFNASLGTYHDLKKILDKSFLDDKTNGQIIEDIVLTLTLFEDRDMIHERLQKYSDFFTSQQLKKLERRHYTGWGRLSYKLINGIRNKENNKTILDFLIDDGHANRNFMQLINDESLSFKTIIQEAQVVGDVDDIEAVVHDLPGSPAIKKGILQSVKIVDELVKVMGDNPDNIVIEMARENQTTGYGRNKSNQRLKRLQDSLKPSYVDSKVENSHLQNDRLFLYYIQNGKDMYTGEELDIDRLSDYDIDHIIPQAFIKDNSIDNKVLTSSAKNRGKSDDVPSIEIVRNRRSYWYKLYKSGLISKRKFDNLTKAERGGLTEADKAGFIKRQLVETRQITKHVAQILDARFNTKRDENDKVIRDVKVITLKSNLVSQFRKEFKFYKVREINDYHHAHDAYLNAVVGTALLKKYPKLTPEFVYGEYKKYDVSSDDYSEMGKATAKYFFYSNLMNFFKTEVKYADGRVFERPDIETNADGEVVWNKQKDFDIVRKVLSYPQVNIVKKVEAQTGGFSKESILSKGDSDKLIPRKTKKVYWNTKKYGGFDSPTVAYSVLVVADIEKGKAKKLKTVKELVGISIMERSFFEENPVSFLEKKGYHNVQEDKLIKLPKYSLFEFEGGRRRLLASATELQKGNEVMLPAHLVELLYHAHRIDSFNSTEHLKYVSEHKKEFEKVLSCVENFSNLYVDVEKNLSKVRAAAESMTNFSLEEISASFINLLTLTALGAPADFNFLGEKIPRKRYTSTKECLSATLIHQSVTGLYETRIDLSKLGEE

SEQ ID NO: 115 - protein, 1358 aa, Streptococcus iniae
MRKPYSIGLDIGTNSVGWAVITDDYKVPSKKMRIQGTTDRTSIKKNLIGALLFDNGETAEATRLKRTTRRRYTRRKYRIKELQKIFSSEMNELDIAFFPRLSESFLVSDDKEFENHPIFGNLKDEITYHNDYPTIYHLRQTLADSDQKADLRLIYLALAHIIKFRGHFLIEGNLDSENTDVHVLFLNLVNIYNNLFEEDVETASIDAEKILTSKTSKSRRLENLIAEIPNQKRNMLFGNLVSLALGLTPNFKTNFELLEDAKLQISKDSYEEDLDNLLAQIGDQYADLFIAAKKLSDAILLSDIITVKGASTKAPLSASMVQRYEEHQQDLALLKNLVKKQIPEKYKEIFDNKEKNGYAGYIDGKTSQEEFYKYIKPILLKLDGTEKLISKLEREDFLRKQRTFDNGSIPHQIHLNELKAIIRRQEKFYPFLKENQKKIEKLFTFKIPYYVGPLANGQSSFAWLKRQSNESITPWNFEEVVDQEASARAFIERMTNFDTYLPEEKVLPKHSPLYEMFMVYNELTKVKYQTEGMKRPVFLSSEDKEEIVNLLFKKERKVTVKQLKEEYFSKMKCFHTVTILGVEDRFNASLGTYHDLLKIFKDKAFLDDEANQDILEEIVWTLTLFEDQAMIERRLVKYADVFEKSVLKKLKKRHYTGWGRLSQKLINGIKDKQTGKTILGFLKDGVANRNFMQLINDSSLDFAKIIKNEQEKTIKNESLEETIANLAGSPAIKKGILQSIKIVDEIVKIMGQNPDNIVIEMARENQSTMQGIKNSRQRLRKLEEVHKNTGSKILKEYNVSNTQLQSDRLYLYLLQDGKDMYTGKELDYDNLSQYDIDHIIPQSFIKDNSIDNTVLTTQASNRGKSDNVPNIETVNKMKSFWYKQLKSGAISQRKFDHLTKAERGALSDFDKAGFIKRQLVETRQITKHVAQILDSRFNSNLTEDSKSNRNVKIITLKSKMVSDFRKDFGFYKLREVNDYHHAQDAYLNAVVGTALLKKYPKLEAEFVYGDYKHYDLPDSSLGKATTRMFFYSNLMNFFKKEIKLADDTIFTRPQIEVNTETGEIVWDKVKDMQTIRKVMSYPQVNIVMKTEVQTGGFSKESIWPKGDSDKLIARKKSWDPKKYGGFDSPIIAYSVLVVAKIAKGKTQKLKTIKELVGIKIMEQDEFEKDPIAFLEKKGYQDIQTSSIIKLPKYSLFELENGRKRLLASELQKGNELALPNKYVKFLYLASHYTKFTGKEEDREKKRSYVESHLYYFDEIMQIIVEYSNRYILADSNLIKIQNLYKEKDNFSIEEQAINMLNLFTFTDLGAPSAFKFFNGDIDRKRYSSTNEIINSTLIYQSPTGLYETRIDLSKLGGK

SEQ ID NO: 116 - protein, 1263 aa, Streptococcus iniae
  SITE 1257: note = misc_feature - Xaa can be any naturally occurring amino acid
MRKPYSIGLDIGTNSVGWAVITDDYKVPSKKMRIQGTTDRTSIKKNLIGALLFDNGETAEATRLKRTTRRRYTRRKYRIKELQKIFSSEMNELDIAFFPRLSESFLVSDDKEFENHPIFGNLKDEITYHNDYPTIYHLRQTLADSDQKADLRLIYLALAHIIKFRGHFLIEGNLDSENTDVHVLFLNLVNIYNNLFEEDVETASIDAEKILTSKTSKSRRLENLIAEIPNQKRNMLFGNLVSLALGLTPNFKTNFELLEDAKLQISKDSYEEDLDNLLAQIGDQYADLFIAAKKLSDAILLSDIITVKGASTKAPLSASMVQRYEEHQQDLALLKNLVKKQIPEKYKEIFDNKEKNGYAGYIDGKTSQEEFYKYIKPILLKLDGTEKLISKLEREDFLRKQRTFDNGSIPHQIHLNELKAIIRRQEKFYPFLKENQKKIEKLFTFKIPYYVGPLANGQSSFAWLKRQSNESITPWNFEEVVDQEASARAFIERMTNFDTYLPEEKVLPKHSPLYEMFMVYNELTKVKYQTEGMKRPVFLSSEDKEEIVNLLFKKERKVTVKQLKEEYFSKMKCFHTVTILGVEDRFNASLGTYHDLLKIFKDKAFLDDEANQDILEEIVWTLTLFEDQAMIERRLVKYADVFEKSVLKKLKKRHYTGWGRLSQKLINGIKDKQTGKTILGFLKDGVANRNFMQLINDSSLDFAKIIKNEQEKTIKNESLEETIANLAGSPAIKKGILQSIKIVDEIVKIMGQNPDNIVIEMARENQSTMQGIKNSRQRLRKLEEVHKNTGSKILKEYNVSNTQLQSDRLYLYLLQDGKDMYTGKELDYDNLSQYDIDHIIPQSFIKDNSIDNTVLTTQASNRGKSDNVPNIETVNKMKSFWYKQLKSGAISQRKFDHLTKAERGALSDFDKAGFIKRQLVETRQITKHVAQILDSRFNSNLTEDSKSNRNVKIITLKSKMVSDFRKDFGFYKLREVNDYHHAQDAYLNAVVGTALLKKYPKLEAEFVYGDYKHYDLPDSSLGKATTRMFFYSNLMNFFKKEIKLADDTIFTRPQIEVNTETGEIVWDKVKDMQTIRKVMSYPQVNIVMKTEVQTGGFSKESIWPKGDSDKLIARKKSWDPKKYGGFDSPIIAYSVLVVAKIAKGKTQKLKTIKELVGIKIMEQDEFEKDPIAFLEKKGYQDIQTSSIIKLPKYSLFELENGRKRLLASELQKGNELALPNKYVKFLYLASHYTKFTGKEEDREKKRSYVESHLYYFXEVKSSF

SEQ ID NO: 117 - protein, 1257 aa, Streptococcus iniae
  SITE 1255: note = misc_feature - Xaa can be any naturally occurring amino acid
  SITE 1257: note = misc_feature - Xaa can be any naturally occurring amino acid
MRKPYSIGLDIGTNSVGWAVITDDYKVPSKKMRIQGTTDRTSIKKNLIGALLFDNGETAEATRLKRTTRRRYTRRKYRIKELQKIFSSEMNELDIAFFPRLSESFLVSDDKEFENHPIFGNLKDEITYHNDYPTIYHLRQTLADSDQKADLRLIYLALAHIIKFRGHFLIEGNLDSENTDVHVLFLNLVNIYNNLFEEDVETASIDAEKILTSKTSKSRRLENLIAEIPNQKRNMLFGNLVSLALGLTPNFKTNFELLEDAKLQISKDSYEEDLDNLLAQIGDQYADLFIAAKKLSDAILLSDIITVKGASTKAPLSASMVQRYEEHQQDLALLKNLVKKQIPEKYKEIFDNKEKNGYAGYIDGKTSQEEFYKYIKPILLKLDGTEKLISKLEREDFLRKQRTFDNGSIPHQIHLNELKAIIRRQEKFYPFLKENQKKIEKLFTFKIPYYVGPLANGQSSFAWLKRQSNESITPWNFEEVVDQEASARAFIERMTNFDTYLPEEKVLPKHSPLYEMFMVYNELTKVKYQTEGMKRPVFLSSEDKEEIVNLLFKKERKVTVKQLKEEYFSKMKCFHTVTILGVEDRFNASLGTYHDLLKIFKDKAFLDDEANQDILEEIVWTLTLFEDQAMIERRLVKYADVFEKSVLKKLKKRHYTGWGRLSQKLINGIKDKQTGKTILGFLKDGVANRNFMQLINDSSLDFAKIIKNEQEKTIKNESLEETIANLAGSPAIKKGILQSIKIVDEIVKIMGQNPDNIVIEMARENQSTMQGIKNSRQRLRKLEEVHKNTGSKILKEYNVSNTQLQSDRLYLYLLQDGKDMYTGKELDYDNLSQYDIDHIIPQSFIKDNSIDNTVLTTQASNRGKSDNVPNIETVNKMKSFWYKQLKSGAISQRKFDHLTKAERGALSDFDKAGFIKRQLVETRQITKHVAQILDSRFNSNLTEDSKSNRNVKIITLKSKMVSDFRKDFGFYKLREVNDYHHAQDAYLNAVVGTALLKKYPKLEAEFVYGDYKHYDLPDSSLGKATTRMFFYSNLMNFFKKEIKLADDTIFTRPQIEVNTETGEIVWDKVKDMQTIRKVMSYPQVNIVMKTEVQTGGFSKESIWPKGDSDKLIARKKSWDPKKYGGFDSPIIAYSVLVVAKIAKGKTQKLKTIKELVGIKIMEQDEFEKDPIAFLEKKGYQDIQTSSIIKLPKYSLFELENGRKRLLASELQKGNELALPNKYVKFLYLASHYTKFTGKEEDREKKRSYVESHLYXFX

SEQ ID NO: 118 - protein, 199 aa, Streptococcus iniae
MEQDEFEKDPIAFLEKKGYQDIQTSSIIKLPKYSLFELENGRKRLLASKELQKGNELALPNKYVKFLYLASHYTKFTGKEEDREKKRSYVESHLYYFDEIMQIIVEYSNRYILADSNLIKIQNLYKEKDNFSIEEQAINMLNLFTFTDLGAPSAFKFFNGDIDRKRYSSTNEIINSTLIYQSPTGLYETRIDLSKLGGK

SEQ ID NO: 119 - protein, 1271 aa, Streptococcus iniae
MRKPYSIGLDIGTNSVGWAVITDDYKVPSKKMRIQGTTDRTSIKKNLIGALLFDNGETAEATRLKRTTRRRYTRRKYRIKELQKIFSSEMNELDIAFFPRLSESFLVSDDKEFENHPIFGNLKDEITYHNDYPTIYHLRQTLADSDQKADLRLIYLALAHIIKFRGHFLIEGNLDSENTDVHVLFLNLVNIYNNLFEEDVETASIDAEKILTSKTSKSRRLENLIAEIPNQKRNMLFGNLVSLALGLTPNFKTNFELLEDAKLQISKDSYEEDLDNLLAQIGDQYADLFIAAKKLSDAILLSDIITVKGASTKAPLSASMVQRYEEHQQDLALLKNLVKKQIPEKYKEIFDNKEKNGYAGYIDGKTSQEEFYKYIKPILLKLDGTEKLISKLEREDFLRKQRTFDNGSIPHQIHLNELKAIIRRQEKFYPFLKENQKKIEKLFTFKIPYYVGPLANGQSSFAWLKRQSNESITPWNFEEVVDQEASARAFIERMTNFDTYLPEEKVLPKHSPLYEMFMVYNELTKVKYQTEGMKRPVFLSSEDKEEIVNLLFKKERKVTVKQLKEEYFSKMKCFHTVTILGVEDRFNASLGTYHDLLKIFKDKAFLDDEANQDILEEIVWTLTLFEDQAMIERRLVKYADVFEKSVLKKLKKRHYTGWGRLSQKLINGIKDKQTGKTILGFLKDGVANRNFMQLINDSSLDFAKIIKNEQEKTIKNESLEETIANLAGSPAIKKGILQSIKIVDEIVKIMGQNPDNIVIEMARENQSTMQGIKNSRQRLRKLEEVHKNTGSKILKEYNVSNTQLQSDRLYLYLLQDGKDMYTGKELDYDNLSQYDIDHIIPQSFIKDNSIDNTVLTTQASNRGKSDNVPNIETVNKMKSFWYKQLKSGAISQRKFDHLTKAERGALSDFDKAGFIKRQLVETRQITKHVAQILDSRFNSNLTEDSKSNRNVKIITLKSKMVSDFRKDFGFYKLREVNDYHHAQDAYLNAVVGTALLKKYPKLEAEFVYGDYKHYDLPDSSLGKATTRMFFYSNLMNFFKKEIKLADDTIFTRPQIEVNTETGEIVWDKVKDMQTIRKVMSYPQVNIVMKTEVQTGGFSKESIWPKGDSDKLIARKKSWDPKKYGGFDSPIIAYSVLVVAKIAKGKTQKLKTIKELVGIKIMEQDEFEKDPIAFLEKKGYQDIQTSSIIKLPKYSLFELENGRKRLLASELQKGNELALPNKYVKFLYLASHYTKFTGKEEDREKKRSYVESHLYYFDVRLSQVFRVTNVEF

SEQ ID NO: 120 - protein, 1345 aa, Streptococcus intermedius
MKKPYSIGLDIGTNSVGWAVVTDDYKVPAKKMKVLGNTDKSHIKKNLLGALLFDSGNTAEDRRLKRTARRRYTRRRNRILYLQEIFSEEMGKVDDSFFHRLEDSFLVTEDKRGERHPIFGNLEEEVKYHENFPTIYHLRQYLADNPEKTDLRLVYLALAHIIKFRGHFLIEGKFDTRNNDVQRLFQEFLAVYDNTFENSSLQEQNVQVEEILTDKISKSAKKDRVLKLFPNEKSNGRFAEFLKLIVGNQADFKKHFELEEKAPLQFSKDTYEEELEVLLAQIEDNYAELFLSAKKLYDSILLSGILTVTDVSTKAPLSASMIQRYNEHQMDLAQLKQFIRQKLSDKYNEVFSDVSKDGYAGYIDGKTNQEAFYKYLKGLLNKIEGSGYFLDKIEREDFLRKQRTFDNGSIPHQIHLQEMRAIIRRQAEFYPFLADNQDRIEKILTFRIPYYIGPLARGKSDFSWLSRKSADKITPWNFDEIVDKESSAEAFINRMTNYDLYLPNQKVLPRHSLLYEKFTVYNELTKVKYKTEQGKTAFFDANMKQEIFDGVFKVYRKVTKDKLMDFLEKEFDEFRIVDLTGLDKENKAFNASYGTYHDLRKILDKDFLDNSKNEKILEDIVLTLTLFEDREMIRKRLENYSDLLTKEQVKNLERRHYTGWGRLSAELIHGIRNKESRKTILDYLIDDGNSNRNFMQLINDDALSFKEEIAKAQVIGETDNLNQVVSDIAGSPAIKKGILQSLKIVDELVKIMGHQPENIVVEMARENQFTNQGRRNSQQRLKGLTDSIKEFGSQILKEHPVENSQLQNDRLFLYYLQNGRDMYTGEELDIDYLSQYDIDHIIPQAFIKDNSIDNRVLTSSKENRGKSDDVPSKDVVRKMKSYWSKLLSAKLITQRKFDNLTKAERGGLTDDDKAGFIKRQLVETRQITKHVARILDERFNTETDENNKKIRQVKIVTLKSNLVSNFRKEFELYKVREINDYHHAHDAYLNAVIGKALLGVYPQLEPEFVYGDYPHFHGHKENKATAKKFFYSNIMNFFKKDDVRTDKNGEIIWKKDEHISNIKKVLSYPQVNIVKKVEEQTGGFSKESILPKGNSDKLIPRKTKKFYWDTKKYGGFDSPIVAYSILVIANIEKGKSKKLKLVKDLVGITIMERTIFEKNPVAFLERKGYRNVQEENIVKLPKYSLFELENGRRRLLASARELQKGNEIVLPNHLGTMLYHAKNIHKVDEPKHLDYVKKHKDEFKELLDVVSNFSKKNILAESNLEKIEELYAQNNNKDITELASSFINLLTFTAIGAPAAFKFFDNNIDRKRYTSTTEILNATLIHQSITGLYETRIDLSRLGGD

SEQ ID NO: 121 - protein, 1333 aa, Streptococcus massiliensis
MKKPYSIGLDIGTNSVGWAVVMEDYKVPSKKMKVLGNTDKQSIKKNLIGALLFDSGETAVERRLNRTTSRRYDRRRNRIRYLQHIFAEEMNRADENFFHRLKESFFVEEDKTYSKYPIFGTLEEEKNYHKNYPTIYHLRKTLADTPDKMDIRLIYLALAHIIKYRGHFLIEGDLDIENIGIQDSFKSFIEEYNTQFGTKLDSTTKVEAIFTENSSKAKRVETILGLFPDETAAGNLDKFLKLMLGNQADFKKVFDLEEKITLQFSKDSYEEDLELLLSKIDEEYAALFDLAKKVYDAVLLSNILTVKEKNTKAPLSASMIKRYEEHKDDLKAFKRFFRERLPEKYETMFKDLTKPSYAAYVSGAVTEDDFYKFSKGLLIDVEGAEYFLEKIEREDFLRKQRTFDNGAIPNQVHVKELQAIILNQSKYYPFLAENKEKIEKILTFRIPYYVGPLARGNSSFAWLQRKSDEAIRPWNFEQVVDMETSASRFIERMTLHDLYLPDEKVLPRHSLIYEKYTVFNELTKVRFTPEGGKEVYFSKTDKENIFDSLFKRYRKVTKRKLKDFIEKELGYGYIDIDNIKGVEEQFNASYTTYQDLLKIIGDKEFLDNEENKDLLEEIIYILTVFEDRKMIEKRLSELNIPFENKIIKKLARKKYTGWGNLSRKLIDGIRNRETNRTILGHLIDDGFSNRNLMQLINDDGLDFKEIIRKAQTIENIDTNQALVSSLPGSPAIKKGILQSLNIVDEIIAIMGYAPTNIVIEMARENQTTQKGRDNSAQRLKKIEDGIKLGSDLLKQNPIQDNKDLQKEKLFLYYMQNGIDLYTGQPLNCDPDSLAFYDVDHIVPRSYIKNDSFDNKVLTTSKGNRKKLDDVPAKEVVEKMENTWRRLHAAGLISDIKLSYLMKGELTEEDKAGFIRRQLVETRQITKHVARLLDEKLNRKKNENGEKLRTTKIITLKSVFASRFRANFDLYKLRELNHYHHAHDAYLNAVVAQALLKVYPKFERELVYGSYVKESIFSRKATERMRMYNNILKFISKDKKDQETGEIVWDKKEIENIVKKVIYSSPVNIVKKREEQSGALFKQSNMAVGYNNKLIPRKKDWSVDKYGGFIEPAESYSLAIFYTDINGKKPKKKSTIIAISRMEKKDYEKEPERFLAQKGFERVEKTIKLPKYSLFEMEKGRRRLLASSGELQKGNQVLLPEHLIRLLSYAKKVDVLVKSKDDDYDLEEHRAEFAELLDCIKKFNDMYILASSNMSKIEEIYQKNIDAPIEEVARSFVLLNFTMMGAATDFKFFGQIIPRKRYPSTTECLKSTLIHQSVTGLYETRIDLSKLGEN

SEQ ID NO: 122 - protein, 1361 aa, Streptococcus mitis
NNKPYSIGLDIGTNSVGWAVITDDYKVPSKKMKVLGNTDKHFIKKNLLGALLFDEGTTAEDRRLKRTARRRYTRRKNRLRYLQEIFTEEMSKVDISFFHRLDDSFLVPEDKRGSKYPIFATLEEEKEYHKNFPTIYHLRKHLADSKEKADFRLIYLALAHIIKYRGHFLYEESFDIKNNDIQKIFNEFISIYDNTFEGSSLNGQNAQVEAIFTDKISKSAKRERVLKLFPDEKSTGLFSEFLKLIVGNQADFKKHFDLEEKAPLQFSKDTYDEDLENLLVQIGDDFADLFLVAKKLYDAILLSGILTVTDPSTKAPLSASMIDRYENHQKDLAALKQFIKTNLPEKYDEVFSDQSKDGYAGYIDGKTTQEAFYKYIKNLLSKLEGADYFLDKIEREDFLRKQRTFDNGSIPHQIHLQEMNAIIRRQGEHYPFLQENKEKIEKILTFRIPYYVGPLARGNRDFAWLTRNSDQAIRPWNFEEIVDKARSAEDFINKMTNYDLYLPEEKVLPKHSLLYETFAVYNELTKVKFIAEGLRDYQFLDSGQKQQIVTQLFKEKRKVTEKDIIQYLHNVDSYDGIELKGIEKQFNASLSTYHDLLKIIKDKEFMDDSKNEAILENIVHTLTIFEDREMIKQRLAHYASIFDEKVIKALTRRHYTGWGKLSAKLINGIYDKQSKKTILDYLIDDGEINRNFMQLINDDGLSFKEIIQKAQVVGKTNDVKQVVQELPGSPAIKKGILQSIKLVDELVKVMGHAPESIVIEMARENQTTARGKKNSQQRYKRIEDALKNLAHNILKEHPTDNIQLQNDRLFLYYLQNGKDMYTGKSLDINQLSSCDIDHIIPQAFIKDDSLDNRVLTSSKDNRGKSDNVPSLEIVQKRKAFWQQLLDSKLISERKFNNLTKAERGGLDERDKVGFIKRQLVETRQITKHVAQILDARFNTEVTEKDKKDRSVKIITLKSNLVSNFRKEFRLYKVREINDYHHAHDPYLNAVVAKAILKKYPKLEPEFVYGDYQKYDLTKDPKEVEKATEKYFFYSNLLNFFKEEVHYADGTIVKRENIEYSKDTGEIAWNKEKDFATIKKVLSLPQVNIVKKTEEQTGGLFDNNIVSKKKVVDASKLTPIKSGLSPEKYGGYARPTIAYSVLVIADIEKGKAKKLKRIKEMVGITVQDKKKFEANPIAYLEECGYKNINPNLIIKLPKYSLFEFNNGQRRLLASSIELQKGNELIVPYHFTALLYHAQRINKISEPIHKQYVETHQSEFKELLTAIISLSKKYIQKPNVESLLQQAFDQSDKDIYQLSESFISLLKLISFGAPGTFKFLGVEISQSNVRYQSVSSCFNATLIHQSITGLYETRIDLSKLGED

SEQ ID NO: 123 - protein, 1359 aa, Streptococcus mitis; identical to SEQ ID NO: 13

SEQ ID NO: 124 - protein, 1345 aa, Streptococcus mutans
MKKPYSIGLDIGTNSVGWAVVTDDYKVPAKKMKVLGNTDKSHIEKNLLGALLFDSGNTAEDRRLKRTARRRYTRRRNRILYLQEIFSEEMGKVDDSFFHRLEDSFLVTEDKRGERHPIFGNLEEEVKYHENFPTIYHLRQYLADNPEKVDLRLVYLALAHIIKFRGHFLIEGKFDTRNNDVQRLFQEFLAVYDNTFENSSLQEQNVQVEEILTDKISKSAKKDRVLKLFPNEKSNGRFAEFLKLIVGNQADFKKHFELEEKAPLQFSKDTYEEELEVLLAQIGDNYAELFLSAKKLYDSILLSGILTVTDVGTKAPLSASMIQRYNEHQMDLAQLKQFIRQKLSDKYNEVFSDVSKDGYAGYIDGKTNQEAFYKYLKGLLNKIEGSGYFLDKIEREDFLRKQRTFDNGSIPHQIHLQEMRAIIRRQAEFYPFLADNQDRIEKLLTFRIPYYVGPLARGKSDFAWLSRKSADKITPWNFDEIVDKESSAEAFINRMTNYDLYLPNQKVLPKHSLLYEKFTVYNELTKVKYKTEQGKTAFFDANMKQEIFDGVFKVYRKVTKDKLMDFLEKEFDEFRIVDLTGLDKENKVFNASYGTYHDLCKILDKDFLDNSKNEKILEDIVLTLTLFEDREMIRKRLENYSDLLTKEQVKKLERRHYTGWGRLSAELIHGIRNKESRKTILDYLIDDGNSNRNFMQLINDDALSFKEEIAKAQVIGETDNLNQVVSDIAGSPAIKKGILQSLKIVDELVKIMGHQPENIVVEMARENQFTNQGRRNSQQRLKGLTDSIKEFGSQILKEHPVENSQLQNDRLFLYYLQNGRDMYTGEELDIDYLSQYDIDHIIPQAFIKDNSIDNRVLTSSKENRGKSDDVPSKDVVRKMKSYWSKLLSAKLITQRKFDNLTKAERGGLTDDDKAGFIKRQLVETRQITKHVARILDERFNTETDENNKKIRQVKIVTLKSNLVSNFRKEFELYKVREINDYHHAHDAYLNAVIGKALLGVYPQLEPEFVYGDYPHFHGHKENKATAKKFFYSNIMNFFKKDDVRTDKNGEIIWKKDEHISNIKKVLSYPQVNIVKKVEEQTGGFSKESILPKGNSDKLIPRKTKKFYWDTKKYGGFDSPIVAYSILVIADIEKGKSKKLKTVKALVGVTIMEKMTFERDPVAFLERKGYRNVQEENIIKLPKYSLFKLENGRKRLLASARELQKGNEIVLPNHLGTLLYHAKNIHKVDEPKHLDYVDKHKDEFKELLDVVSNFSKKYTLAEGNLEKIKELYAQNNGEDLKELASSFINLLTFTAIGAPATFKFFDKNIDRKRYTSTTEILNATLIHQSITGLYETRIDLNKLGGD

SEQ ID NO: 125 - protein, 1345 aa, Streptococcus mutans
MKKPYSIGLDIGTNSVGWAVVTDDYKVPAKKMKVLGNTDKSHIEKNLLGALLFDSGNTAEDRRLKRTARRRYTRRRNRILYLQEIFSEEMGKVDDSFFHRLEDSFLVTEDKRGERHPIFGNLEEEVKYHENFPTIYHLRQYLADNPEKVDLRLVYLALAHIIKFRGHFLIEGKFDTRNNDVQRLFQEFLAVYDNTFENSSLQEQNVQVEEILTDKISKSAKKDRVLKLFPNEKSNGRFAEFLKLIVGNQADFKKHFELEEKAPLQFSKDTYEEELEVLLAQIGDNYAELFLSAKKLYDSILLSGILTVTDVGTKAPLSASMIQRYNEHQMDLAQLKQFIRQKLSDKYNEVFSDVSKDGYAGYIDGKTNQEAFYKYLKGLLNKIEGSGYFLDKIEREDFLRKQRTFDNGSIPHQIHLQEMRAIIRRQAEFYPFLADNQDRIEKLLTFRIPYYVGPLARGKSDFAWLSRKSADKITPWNFDEIVDKESSAEAFINRMTNYDLYLPNQKVLPKHSLLYEKFTVYNELIKVKYKTEQGKTAFFDANMKQEIFDGVFKVYRKVTKDKLMDFLEKEFDEFRIVDLTGLDKENKVFNASYGTYHDLCKILDKDFLDNSKNEKILEDIVLTLTLFEDREMIRKRLENYSDLLTKEQVKKLERRHYTGWGRLSAELIHGIRNKESRKTILDYLIDDGNSNRNFMQLINDDALSFKEEIAKAQVIGETDNLNQVVSDIAGSPAIKKGILQSLKIVDELVKIMGHQPENIVVEMARENQFTNQGRRNSQQRLKGLTDSIKEFGSQILKEHPVENSQLQNDRLFLYYLQNGRDMYTGEELDIDYLSQYDIDHIIPQAFIKDNSIDNRVLTSSKENRGKSDDVPSKDVVRKMKSYWSKLLSAKLITQRKFDNLTKAERGGLTDDDKAGFIKRQLVETRQITKHVARILDERFNTETDENNKKIRQVKIVTLKSNLVSNFRKEFELYKVREINDYHHAHDAYLNAVIGKALLGVYPQLEPEFVYGDYPHFHGHKENKATAKKFFYSNIMNFFKKDDVRTDKNGEIIWKKDEHISNIKKVLSYPQVNIVKKVEEQTGGFSKESILPKGNSDKLIPRKTKKFYWDTKKYGGFDSPIVAYSILVIADIEKGKSKKLKTVKALVGVTIMEKMTFERDPVAFLERKGYRNVQEENIIKLPKYSLFKLENGRKRLLASARELQKGNEIVLPNHLGTLLYHAKNIHKVDEPKHLDYVDKHKDEFKELLDVVSNFSKKYTLAEGNLEKIKELYAQNNGEDLKELASSFINLLTFTAIGAPATFKFFDKNIDRKRYTSTTEILNATLIHQSITGLYETRIDLNKLGGD

SEQ ID NO: 126 - protein, 1345 aa, Streptococcus mutans
MKKPYSIGLDIGTNSVGWAVVTDDYKVPAKKMKVLGNTDKSHIKKNLLGALLFDSGNTAEDRRLKRTARRRYTRRRNRILYLQEIFSEEMGKVDDSFFHRLDESFLTDDDKNFDSYPIFGNKAEEDAYHQKFPTIYHLRKHLADSTEKADLRLVYLALAHMIKFRGHFLIEGELNAENTDVQKLFADFVGVYDRTFDDSHLSEITVDASSILTEKISKSRRLEKLINNYPKEKKNTLFRNLVALSLGLQPNFKTNFKLSEDAKLQFSKDTYEEDLEELLGKIGDDYADLFTLAKNLYDAILLSGILTADDSSTKAPLSASMIKRYAEHHEDLEKLKEFIKANKPELYHDIFKDETKNGYAGYIENGVKQDEFYKYLKNTLSKIAGSDYFLDKIEREDFLRKQRTFDNGSIPHQIHLQEMHAILRRQGDYYPFLKENQDRIEKILTFRIPYYVGPLARGKSDFAWLSRKSADKITPWNFDEIVDKESSVEAFINRMTNYDLYLPNQKVLPKHSLLYEKFTVYNELTKVKYKTEQGKTAFFDANMKQEIFDGVFKVYRKVTKDKLMDFLEKEFDEFRIVDLTGLDKENKAFNASYGTYHDLRKILDKDFLDNSKNEKILEDIVLTLTLFEDREMIRKRLKNYSDLLTKEQLKKLERRHYTGWGRLSAELIHGIRNKESRKTILDYLIDDGNSNRNFMQLINDDALSFKEEIAKAQVIGETDNLNQVVSDIAGSPAIKKGILQSLKIVDELVKIMGHQPENIVVEMARENQFTNQGRRNSQQRLKGLTDSIKEFGSQILKEHPVENSQLQNDRLFLYYLQNGRDMYTGEELDIDYLSQYDIDHIIPQAFIKDNSIDNRVLTSSKENRGKSDDVPSKDVVRKMKSYWSKLLSAKLITQRKFDNLTKGERGGLTDDDKAGFIKRQLVETRQITKHVARILDERFNTETDENNKKIRQVKIVTLKSNLVSNFRKEFELYKVREINDYHHAHDAYLNAVIGKALLGVYPQLEPEFVYGDYPHFHGHKENKATAKKFFYSNIMNFFKKDDVRTDKNGEIIWKKDEYISNIKKVLSYPQVNIVKKVEEQTGGFSKESILPKGDSDKLIPRKTKKFYWDTKKYGGFDSPIVAYSILVIADIEKGKSKKLKTVKALVGVTIMEKMTFERDPVAFLERKGYRNVQEENIIKLPKYSLFKLENGRKRLLASARELQKGNEIVLPNHLGTLLYHAKNIHKVDEPKHLDYVDKHKDEFKELLDVVSNFSKKYTLAEGNLEKIKELYAQNNGEDLKELASSFINLLTFTAIGAPATFKFFDKNIDRKRYTSTTEILNATLIHQSITGLYETRIDLSKLGGD

SEQ ID NO: 127 - protein, 1345 aa, Streptococcus mutans
MKKPYSIGLDIGTNSVGWAVVTDDYKVPAKKMKVLGNTDKSHIKKNLLGALLFDSGNTAEDRRLKRTARRRYTRRRNRILYLQEIFSEEMGKVDDSFFHRLEDSFLVTEDKRGERHPIFGNLEEEVKYHENFPTIYHLRQYLADNPEKTDLRLVYLALAHIIKFRGHFLIEGKFDTRNNDVQRLFQEFLAVYDNTFENSSLQEQNVQVEEILTDKISKSAKKDRVLKLFPNEKSNGRFAEFLKLIVGNQADFKKHFELEEKAPLQFSKDIYEEELEVLLAQIGDNYAELFLSAKKLYDSILLSGILTVTDVSTKAPLSASMIQRYNEHQMDLAQLKQFIRQKLSDKYNEVFSDVSKDGYAGYIDGKTNQEAFYKYLKGLLNKIEGSGYFLDKIEREDFLRKQRTFDNGSIPHQIHLQEMRAIIRRQAEFYPFLADNQDRIEKILTFRIPYYVGPLARGKSDFAWLSRKSADKITPWNFDEIVDKESSVEAFINRMTNYDLYLPNQKVLPKHSLLYEKFTVYNELTKVKYKTEQGKTAFFDANMKQEIFDGVFKVYRKVTKDKLMDFLEKEFDEFRIVDLTGLDKENKAFNASYGTYHDLRKILDKDFLDNSKNEKILEDIVLTLTLFEDREMIRKRLKNYSDLLTKEQLKKLERRHYTGWGRLSAELIHGIRNKESRKTILDYLIDDGNSNRNFMQLINDDALSFKEEIAKAQVIGETDNLNQVVSDIAGSPAIKKGILQSLKIVDELVKIMGHQPENIVVEMARENQFTNQGRRNSQQRLKGLTDSIKEFGSQILKEHPVENSQLQNDRLFLYYLQNGRDMYTGEELDIDYLSQYDIDHIIPQAFIKDNSIDNRVLTSSKENRGKSDDVPSKDVVRKMKSYWSKLLSAKLITQRKFDNLTKAERGGLTDDDKAGFIKRQLVETRQITKHVARILDERFNTETDENNKKIRQVKIVTLKSNLVSNFRKEFELYKVREINDYHHAHDAYLNAVIGKALLGVYPQLEPEFVYGDYPHFHGHKENKATAKKFFYSNIMNFFKKDDVRTDKNGEIIWKKDEHISNIKKVLSYPQVNIVKKVEEQTGGFSKESILPKGNSDKLIPRKTKKFYWDTKKYGGFDSPIVAYSILVIADIEKGKSKKLKTVKALVGVTIMEKMTFERDPVAFLERKGYRNVQEENIIKLPKYSLFKLENGRKRLLASARELQKGNEIVLPNHLGTLLYHAKNIHKVDEPKHLDYVDKHKDEFKELLDVVSNFSKKYTLAEGNLEKIKELYAQNNGEDLKELASSFINLLTFTAIGAPATFKFFDKNIDRKRYTSTTEILNATLIHQSITGLYETRIDLNKLGGD

SEQ ID NO: 128 - protein, 1345 aa, Streptococcus mutans
MKKPYSIGLDIGTNSVGWAVVTDDYKVPAKKMKVLGNTDKSHIKKNLLGALLFDSGNTAEDRRLKRTARRRYTRRRNRILYLQEIFSEEMGKVDDSFFHRLEDSFLVTEDKRGERHPIFGNLEEEVKYHENFPTIYHLRQYLADNPEKVDLRLVYLALAHIIKFRGHFLIEGKFDTRNNDVQRLFQEFLAVYDNTFENSSLQEQNVQVEEILTDKISKSAKKDRVLKLFPNEKSNGRFAEFLKLIVGNQADFKKHFELEEKAPLQFSKDTYEEELEVLLAQIGDNYAELFLSAKKLYDSILLSGILTVTDVSTKAPLSASMIQRYNEHQMDLAQLKQFIRQKLSDKYNEVFSDVSKDGYAGYIDGKTNQEAFYKYLKGLLNKIEGSGYFLDKIEREDFLRKQRTFDNGSIPHQIHLQEMRAIIRRQAEFYPFLADNQDRIEKILTFRIPYYVGPLARGKSDFAWLSRKSADKITPWNFDEIVDKESSAEAFINRMTNYDLYLPNQKVLPKHSLLYEKFTVYNELTKVKYKTEQGKTAFFDANMKQEIFDGVFKVYRKVTKDKLMDFLEKEFDEFRIVDLTGLDKENKVFNASYGTYHDLCKILDKDFLDNSKNEKILEDIVLTLTLFEDREMIRKRLENYSDLLTKEQVKKLERRHYTGWGRLSAELIHGIRNKESRKTILDYLIDDGNSNRNFMQLINDDALSFKEEIAKAQVIGETDNLNQVVSDIAGSPAIKKGILQSLKIVDELVKIMGHQPENIVVEMARENQFTNQGRQNSQQRLKGLTDSIKEFGSQILKEHPVENSQLQNDRLFLYYLQNGRDMYTGEELDIDYLSQYDIDHIIPQAFIKDNSIDNRVLTSSKENRGKSDDVPSEDVVRKMKSYWSKLLSAKLITQRKFDNLTKAERGGLTDDDKAGFIKRQLVETRQITKHVARILDERFYTETDENNKKIRQVKIVTLKSNLVSNFRKEFELYKVREINDYHHAHDAYLNAVIGKALLGVYPQLEPEFVYGDYPHFHGHKENKATAKKFFYSNIMNFFKKDDVRTDKNGEIIWKKDEHISNIKKVLSYPQVNIVKKVEEQTGGFSKESILPKGNSDKLIPRKTKKFYWDTKKYGGFDSPIVAYSILVIADIEKGKSKKLKTVKALVGVTIMEKMTFERDPVAFLERKGYRNVQEENIIKLPKYSLFKLENGRKRLLASARELQKGNEIVLPNHLGTLLYHAKNIHKVDEPKHLDYVDKHKDEFKELLDVVSNFSKKYTLAEGNLEKIKELYAQNNGEDLKELASSFINLLTFTAIGAPATFKFFDKNIDRKRYTSTTEILNATLIHQSITGLYETRIDLSKLGGD

SEQ ID NO: 129 - protein, 1345 aa, Streptococcus mutans
MKKPYSIGLDIGTNSVGWAVVTDDYKVPAKKMKVLGNTDKSHIKKNLLGALLFDSGNTAEDRRLKRTARRRYTRRRNRILYLQEIFSEEMGKVDDSFFHRLEDSFLVTEDKRGERHPIFGNLEEEVKYHENFPTIYHLRQYLADNPEKVDLRLVYLALAHIIKFRGHFLIEGKFDTRNNDVQRLFQEFLAVYDNTFENSSLQEQNVQVEEILTDKISKSAKKDRVLKLFPNEKSNGRFAEFLKLIVGNQADFKKHFELEEKAPLQFSKDTYEEDLEELLGKIGDDYADLFTLAKNLYDAILLSGILTADDSSTKAPLSASMIQRYNEHQMDLAQLKQFIRQKLSDKYNEVFSDVSKDGYAGYIDGKTNQEAFYKYLKGLLNKIEGSGYFLDKIEREDFLRKQRTFDNGSIPHQIHLQEMRAIIRRQAEFYPFLADNQDRIEKILTFRIPYYVGPLARGKSDFAWLSRKSADKITPWNFDEIVDKESSAEAFINRMTNYDLYLPNQKVLPKHSLLYEKFTVYNELTKVKYKTEQGKTAFFDANMKQEIFDGVFKVYRKVTKDKLMDFLEKEFDEFRIVDLTGLDKENKVFNASYGTYHDLCKILDKDFLDNSKNEKILEDIVLTLTLFEDREMIRKRLENYSDLLTKEQVKKLERRHYTGWGRLSAELIHGIRNKESRKTILDYLIDDGNSNRNFMQLINDDALSFKEEIAKAQVIGETDNLNQVVSDIAGSPAIKKGILQSLKIVDELVKIMGHQPENIVVEMARENQFTNQGRRNSQQRLKGLTDSIKEFGSQILKEHPVENSQLQNDRLFLYYLQNGRDMYTGEELDIDYLSQYDIDHIIPQAFIKDNSIDNRVLTSSKENRGKSDDVPSKDVVRKMKSYWSKLLSAKLITQRKFDNLTKAERGGLTDDDKAGFIKRQLVETRQITKHVARILDERFYTETDENNKKIRQVKIVTLKSNLVSNFRKEFELYKVREINDYHHAHDAYLNAVIGKALLGVYPQLEPEFVYGDYPHFHGHKENKATAKKFFYSNIMNFFKKDDVRTDKNGEIIWKKDEHISNIKKVLSYPQVNIVKKVEEQTGGFSKESILPKGNSDKLIPRKTKKFYWDTKKYGGFDSPIVAYSILVIADIEKGKSKKLKTVKALVGVTIMEKMTFERDPVAFLERKGYRNVQEENIIKLPKYSLFKLENGRKRLLASARELQKGNEIVLPNHLGTLLYHAKNIHKVDEPKHLDYVDKHKDEFKELLDVVSNFSKKYTLAEGNLEKIKELYAQNNGEDLKELASSFINLLTFTAIGAPATFKFFDKNIDRKRYTSTTEILNATLIHQSITGLYETRIDLSKLGGD

SEQ ID NO: 130 - protein, 1345 aa, Streptococcus mutans
MKKPYSIGLDIGTNSVGWAVVTDDYKVPAKKMKVLGNTDKSHIKKNLLGALLFDSGNTAEDRRLKRTARRRYTRRRNRILYLQEIFSEEMGKVDDSFFHRLEDSFLVTEDKRGERHPIFGNLEEEVKYHENFPTIYHLRQYLADNPEKVDLRLVYLALAHIIKFRGHFLIEGKFDTRNNDVQRLFQEFLAVYDNTFENSSLQEQNVQVEEILTDKISKSAKKDRVLKLFPNEKSNGRFAEFLKLIVGNQADFKKHFELEEKAPLQFSKDTYEEDLEELLGKIGDDYADLFTLAKNLYDAILLSGILTADDSSTKAPLSASMIQRYNEHQMDLAQLKQFIRQKLSDKYNEVFSDVSKDGYAGYIDGKTNQEAFYKYLKGLLNKIEGSGYFLDKIEREDFLRKQRTFDNGSIPHQIHLQEMRAIIRRQAEFYPFLADNQDRIEKILTFRIPYYVGPLARGKSDFAWLSRKSADKITPWNFDEIVDKESSAEAFINRMTNYDLYLPNQKVLPKHSLLYEKFTVYNELTKVKYKTEQGKTAFFDANMKQEIFDGVFKVYRKVTKDKLMDFLEKEFDEFRIVDLTGLDKENKVFNASYGTYHDLCKILDKDFLDNSKNEKILEDIVLTLTLFEDREMIRKRLENYSDLLTKEQVKKLERRHYTGWGRLSAELIHGIRNKESRKTILDYLIDDGNSNRNFMQLINDDALSFKEEIAKAQVIGETDNLNQVVSDIAGSPAIKKGILQSLKIVDELVKIMGHQPENIVVEMARENQFTNQGRRNSQQRLKGLTDSIKEFGSQILKEHPVENSQLQNDRLFLYYLQNGRDMYTGEELDIDYLSQYDIDHIIPQAFIKDNSIDNRVLTSSKENRGKSDDVPSKDVVRKMKPYWSKLLSAKLITQRKFDNLTKAERGGLTDDDKAGFIKRQLVETRQITKHVARILDERFNTETDENNKKIRQVKIVTLKSNLVSNFRKEFELYKVREINDYHHAHDAYLNAVIGKALLGVYPQLEPEFVYGDYPHFHGHEENKATAKKFFYSNIMNFFKKDDVRTDKNGEIIWKKDEHISNIKKVLSYPQVNIVKKVEEQTGGFSKESILPKGNSDKLIPRKTKKFYWDTKKYGGFDSPIVAYSILVIADIEKGKSKKLKTVKALVGVTIMEKMTFERDPVAFLERKGYRNVQEENIIKLPKYSLFKLENGRKRLLASARELQKGNEIVLPNHLGTLLYHAKNIHKVDEPKHLDYVDKHKDEFKELLDVVSNFSKKYTLAEGNLEKIKELYAQNNGEDLKELASSFINLLTFTAIGAPATFKFFDKNIDRKRYTSTTEILNATLIHQSITGLYETRIDLSKLGGD

SEQ ID NO: 131 - protein, 1345 aa, Streptococcus mutans
MKKPYSIGLDIGTNSVGWAVVTDDYKVPAKKMKVLGNTDKSHIKKNLLGALLFDSGNTAEDRRLKRTARRRYTRRRNRILYLQEIFSEEMGKVDDSFFHRLEDSFLVTEDKRGERHPIFGNLEEEVKYHENFPTIYHLRQYLADNPEKVDLRLVYLALAHIIKFRGHFLIEGKFDTRNNDVQRLFQEFLAVYDNTFENSSLQEQNVQVEEILTDKISKSAKKDRVLKLFPNEKSNGRFAEFLKLIVGNQADFKKHFELEEKAPLQFSKDTYEEELEVLLAQIGDNYAELFLSAKKLYDSILLSGILTVTDVSTKAPLSASMIQRYNEHQMDLAQLKQFIRQKLSDKYNEVFSDVSKDGYAGYIDGKTNQEAFYKYLKGLLNKIEGSGYFLDKIEREDFLRKQRTFDNGSIPHQIHLQEMRAIIRRQAEFYPFLADNQDRIEKILTFRIPYYVGPLARGKSDFAWLSRKSADKITPWNFDEIVDKESSAEAFINRMTNYDLYLPNQKVLPKHSLLYEKFTVYNELTKVKYKTEQGKTAFFDANMKQEIFDGVFKVYRKVTKDKLMDFLEKEFDEFRIVDLTGLDKENKVFNASYGTYHDLCKILDKDFLDNSKNEKILEDIVLTLTLFEDREMIRKRLENYSDLLTKEQVKKLERRHYTGWGRLSAELIHGIRNKESRKTILDYLIDDGNSNRNFMQLINDDALSFKEEIAKAQVIGETDNLNQVVSDIAGSPAIKKGILQSLKIVDELVKIMGHQPENIVVEMARENQFTKQGRRNSQQRLKGLTDSIKEFGSQILKEHPVENSQLQNDRLFLYYLQNGRDMYTGEELDIDYLSQYDIDHIIPQAFIKDNSIDNRVLTSSKENRGKSDDVPSKDVVRKMKSYWSKLLSAKLITQRKFDNLTKAERGGLTDDDKAGFIKRQLVETRQITKHVARILDERFYTETDENNKKIRQVKIVTLKSNLVSNFRKEFELYKVREINDYHHAHDAYLNAVIGKALLGVYPQLEPEFVYGDYPHFHGHKENKATAKKFFYSNIMNFFKKDDVRTDKNGEIIWKKDEHISNIKKVLSYPQVNIVKKVEEQTGGFSKESILPKGNSDKLIPRKTKKFYWDTKKYGGFDSPIVAYSILVIADIEKGKSKKLKTVKALVGVTIMEKMTFERDPVAFLERKGYRNVQEENIIKLPKYSLFKLENGRKRLLASARELQKGNEIVLPNHLGTLLYHAKNIHKVDEPKHLDYVDKHKDEFKELLDVVSNFSKKYTLAEGNLEKIKELYAQNNGEDLKELASSFINLLTFTAIGAPATFKFFDKNIDRKRYTSTTEILNATLIHQSITGLYETRIDLSKLGGD

SEQ ID NO: 132 - protein, 1345 aa, Streptococcus mutans
MKKPYSIGLDIGTNSVGWAVVTDDYKVPAKKMKVLGNTDKSHIKKNLLGALLFDSGNTAADRRLKRTARRRYTRRRNRILYLQEIFAEEMSKVDDSFFHRLEDSFLVTEDKRGERHPIFGNLEEEVKYHENFPTIYHLRQYLADNPEKVDLRLVYLALAHIIKFRGHFLIEGKFDTRNNDVQRLFQEFLAVYDNTFENSSLQEQNVQVEEILTDKISKSAKKDRVLKLFPNEKSNGRFAEFLKLIVGNQADFKKHFELEEKAPLQFSKDTYEEELEVLLTQIGDNYAELFLSAKKLYDSILLSGILTVTDVSTKAPLSASMIQRYNEHQMDLAQLKQFIRQKLSDKYNEVFSDVSKDGYAGYIDGKTNQEAFYKYLKGLLNKIEGSGYFLDKIEREDFLRKQRTFDNGSIPHQIHLQEMRAIIRRQAEFYPFLADNQDRIEKILTFRIPYYVGPLARGKSDFAWLSRKSADKITPWNFDEIVDKESSAEAFINRMTNYDLYLPNQKVLPKHSLLYEKFTVYNELTKVKYKTEQGKTAFFDANMKQEIFDGVFKVYRKVTKDKLMDFLEKEFDEFRIVDLTGLDKENKAFNASYGTYHDLRKILDKDFLDNSKNEKILEDIVLTLTLFEDREMIRKRLENYSDLLTKEQVKKLERRHYTGWGRLSAELIHGIRNKESRKTLLDYLIDDGNSNRNFMQLINDDALSFKEEIAKAQVIGETDNLNQVVSDIAGSPAIKKGILQSLKIVDELVKIMGHQPENIVVEMARENQFTNQGRRNSQQRLKGLTDSIKEFGSQILKEHPVENSQLQNDRLFLYYLQNGRDMYTGEELDIDYLSQYDIDHIIPQAFIKDNSIDNRVLTSSKENRGKSDDVPSKDVVRKMKPYWSKLLSAKLITQRKFDNLTKAERGGLTDDDKAGFIKRQLVETRQITKHVARILDERFNTETDENNKKIRQVKIVTLKSNLVSNFRKEFELYKVREINDYHHAHDAYLNAVIGKALLGVYPQLEPEFVYGDYPHFHGHEENKATAKKFFYSNIMNFFKKDDVRTDKNGEIIWKKDEHISNIKKVLSYPQVNIVKKVEEQTGGFSKESILPKGNSDKLIPRKTKKFYWDTKKYGGFDSPIVAYSILVIADIEKGKSKKLKTVKALVGVTIMEKMTFERDPVAFLERKGYRNVQEENIIKLPKYSLFKLENGRKRLLASARELQKGNEIVLPNHLGTLLYHAKNIHKVDEPKHLDYVDKHKDEFKELLDVVSNFSKKYTLAEGNLEKIKELYAQNNGEDLKELSSSFINLLTFTAIGAPAAFKFFDKNIDRKRYTSTTEILNATLIHQSITGLYETRIDLSKLGGD

SEQ ID NO: 133 - protein, 1345 aa, Streptococcus mutans
MKKPYSIGLDIGTNSVGWAVVTDDYKVPAKKMKVLGNTDKSHIKKNLLGALLFDSGNTAEDRRLKRTARRRYTRRRNRILYLQEIFSEEMGKVDDSFFHRLEDSFLVTEDKRGERHPIFGNLEEEVKYHENFPTIYHLRQYLADNPEKVDLRLVYLALAHIIKFRGHFLIEGKFDTRNNDVQRLFQEFLAVYDNTFENSSLQEQNVQVEEILTDKISKSAKKDRVLKLFPNEKSNGRFAEFLKLIVGNQADFKKHFELEEKAPLQFSKDTYEEELEVLLAQIGDNYAELFLSAKKLYDSILLSGILTVTDVSTKAPLSASMIQRYNEHQMDLAQLKQFIRQKLSDKYNEVFSDVSKDGYAGYIDGKTNQEAFYKYLKGLLNKIEGSGYFLDKIEREDFLRKQRTFDNGSIPHQIHLQEMRAIIRRQAEFYPFLADNQDRIEKILTFRIPYYVGPLARGKSDFAWLSRKSADKITPWNFDEIVDKESSAEAFINRMTNYDLYLPNQKVLPKHSLLYEKFTVYNELTKVKYKTEQGKTAFFDANMKQEIFDGVFKVYRKVTKDKLMDFLEKEFDEFRIVDLTGLDKENKVFNASYGTYHDLCKILDKDFLDNSKNEKILEDIVLTLTLFEDREMIRKRLENYSDLLTKEQVKKLERRHYTGWGRLSAELIHGIRNKESRKTILDYLIDDGNSNRNFMQLINDDALSFKEEIAKAQVIGETDNLNQVVSDIAGSPAIKKGILQSLKIVDELVKIMGHQPENIVVEMARENQFTKQGRRNSQQRLKGLTDSIKEFGSQILKEHPVENSQLQNDRLFLYYLQNGRDMYTGEELDIDYLSQYDIDHIIPQAFIKDNSIDNRVLTSSKENRGKSDDVPSKDVVRKMKSYWSKLLSAKLITQRKFDNLTKAERGGLTDDDKAGFIKRQLVETRQITKHVARILDERFYTETDENNKKIRQVKIVTLKSNLVSNFRKEFELYKVREINDYHHAHDAYLNAVIGKALLGVYPQLEPEFVYGDYPHFHGHKENKATAKKFFYSNIMNFFKKDDVRTDRNGEIIWKKDEHISNIKKVLSYPQVNIVKKVEEQTGGFSKESILPKGNSDKLIPRKTKKFYWDTKKYGGFDSPIVAYSILVIADIEKGKSKKLKTVKALVGVTIMEKMTFERDPVAFLERKGYRNVQEENIIKLPKYSLFKLENGRKRLLASARELQKGNEIVLPNHLGTLLYHAKNIHKVDEPKHLDYVDKHKDEFKELLDVVSNFSKKYTLAEGNLEKIKELYAQNNGEDLKELASSFINLLTFTAIGAPATFKFFDKNIDRKRYTSTTEILNATLIHQSITGLYETRIDLSKLGGD

SEQ ID NO: 134 - protein, 1336 aa, Streptococcus mutans
MKKSYSIGLDIGTNSVGWAVVTDDYKVPAKKMKVLGNTDKSHIKKNLLGALLFDSGNTAEDRRLKRTARRRYTRRRNRILYLQEIFSEEMGKVDDSFFHRLDESFLTDDDKNFDSHPIFGNKAEEDAYHQKFPTIYHLRKHLADSTEKADLRLVYLALAHMIKFRGHFLIEGELNAENTDVQKLFADFVGVYDRTFDDSHLSEITVDASSILTEKISKSRRLEKLINNYPKEKKNTLFGNLIALSLGLQPNFKTNFKLSEDAKLQFSKDTYEEDLEELLGKIGDDYADLFTLAKNLYDAILLSGILTADDSSTKAPLSASMIKRYAEHHEDLEKLKEFIKANKPELYHDIFKDETKNGYAGYIENGVKQDEFYKYLKNTLSKIAGSDYFLDKIEREDFLRKQRTFDNGSIPHQIHLQEMHAILRRQGDYYPFLKENQDRIEKILTFRIPYYVGPLARKNSRFAWAEYHSDEAVMPWNFDQVIDKESSAQAFIEHMTNNDLYLPNEKVLPKHSPLYEKYTVYNELTKIKYVTEIGEAKFFDANLKQEIFDGLFKHERKVTKKKLRTFLDKNFDEFRIVDIQGLDKETETFNASYATYQDLLKVIKDKVFMDNPENAEILENIVLTLTLFEDREMIKQRLAKYADVFDKKVIDQLARRHYTGWGRLSAKLLNGIRDKQSCKTIMDYLIDDAQSNRNLMQLITDDNLTFKDDIVKAQYVDNSDDLHQVVQSLAGSPAIKKGILQSLKIVDELVKVMGKEPEQIVVEMARENQTTAKGRRNSQQRYKRLKEAIKDLNHKILKEHPTDNQALQNNRLFLYYLQNGRDMYTGESLDINRLSDYDIDHVIPQAFIKDNSIDNRVLTSSKANRGKSDDVPSEDVVNRMRPFWNKLLSSGLISQRKYNNLTKKELTPDDKAGFIKRQLVETRQITKHVARMLDERFNKEFDDNNKRIRRVKIVTLKSNLVSSFRKEFELYKVREINDYHHAHDAYLNAVVVKALLVKYPKLEPEFVYGEYPKYNSYRERKATQKMFFYSNIMNMFKSKVKLADDQIVERPMIEVNDETGEIAWDKTKHITTVKKVLSYPQVNIVKKVEEQTGGLFDPKSPLEKLVPLKKALNPEKYGGYQKPTTAYPILLIVDTKQLIPISVMDKKRFEQNPVKFLKDKGYQQIEKNNFVKLPKYTLVDIGNGIKRLWASSKEVHKGNQLVVSKKSQDLLYHAHHLDNDYSNEYVKNHYQQFDILFNEITSFSKKCKLGKEHIQKIEEAYSKERDSASIEELADGFIKLLGFTQLGATSPFSFLGIKLNQKQYTGKKDYLEATLIHQSITGLYETRIDLNKLGGD

SEQ ID NO: 135 - protein, 1345 aa, Streptococcus mutans
MKKPYSIGLDIGTNSVGWAVVTDDYKVPAKKMKVLGNTDKSHIKKNLLGALLFDSGNTAADRRLKRTARRRYTRRRNRILYLQEIFAEEMSKVDDSFFHRLEDSFLVTEDKRGERHPIFGNLEEEVKYHENFPTIYHLRQYLADNPEKVDLRLVYLALAHIIKFRGHFLIEGKFDTRNNDVQRLFQEFLAVYDNTFENSSLQEQNVQVEEILTDKISKSAKKDRVLKLFPNEKSNGRFAEFLKLIVGNQADFKKHFELEEKAPLQFSKDTYEEELEVLLAQIGDNYAELFLSAKKLYDSILLSGILTVTDVSTKAPLSASMIQRYNEHQMDLAQLKQFIRQKLSDKYNEVFSDVSKDGYAGYIDGKTNQEAFYKYLKGLLNKIEGSGYFLDKIEREDFLRKQRTFDNGSIPHQIHLQEMRAIIRRQAEFYPFLADNQDRIEKILTFRIPYYVGPLARGKSDFAWLSRKSADKITPWNFDEIVDKESSAEAFINRMTNYDLYLPNQKVLPKHSLLYEKFTVYNELTKVKYKTEQGKTAFFDANMKQEIFDGVFKVYRKVTKDKLMDFLEKEFDEFRIVDLTGLDKENKAFNASYGTYHDLRKILDKDFLDNSKNEKILEDIVLTLTLFEDREMIRKRLENYSDLLTKEQVKKLERRHYTGWGRLSAELIHGIRNKESRKTILDYLIDDGNSNRNFMQLINDDALSFKEEIAKAQVIGETDNLNQVVSDIAGSPAIKKGILQSLKIVDELVKIMGHQPENIVVEMARENQFTNQGRRNSQQRLKGLTDSIKEFGSQILKEHPVEHSQLQNDRLFLYYLQNGRDMYTGEELDIDYLSQYDIDHIIPQAFIKDNSIDNRVLTSSKENRGKSDDVPSKNVVRKMKSYWSKLLSAKLITQRKFDNLTKAERGGLTDDDKAGFIKRQLVETRQITKHVARILDERFHTETDENNKKIRQVKIVTLKSNLVSNFRKEFELYKVREINDYHHAHDAYLNAVIGKALLGVYPQLEPEFVYGDYPHFHGHKENKATAKKFFYSNIMNFFKKDDVRTDKNGEIIWKKDEHISNIKKVLSYPQVNIVKKVEEQTGGFSKESILPKGNSDKLIPRKTKKFYWDTKKYGGFDSPIVAYSILVIADIEKGKSKKLKTVKALVGVTIMEKMTFERDPVAFLERKGYRNVQEENIIKLPKYSLFKLENGRKRLLASARELQKGNEIVLPNHLGTLLYHAKNIHKVDEPKHLDYVDKHKDEFKELLDVVSNFSKKYTLAEGNLEKIKELYAQNNGEDLKELASSFINLLTFTAIGAPATFKFFDKNIDRKRYTSTTEILNATLIHQSITGLYETRIDLSKLGGD

SEQ ID NO: 136 - protein, 1345 aa, Streptococcus mutans
MKKPYSIGLDIGTNSVGWAVVTDDYKVPAKKMKVLGNTDKSHIEKNLLGALLFDSGNTAEDRRLKRTARRRYTRRRNRILYLQEIFSEEMGKVDDSFFHRLEDFFLVTEDKRGERHPIFGNLEEEVKYHENFPTIYHLRQYLADNPEKVDLRLVYLALAHIIKFRGHFLIEGKFDTRNNDVQRLFQEFLAVYDNTFENSSLQEQNVQVEEILTDKISKSAKKDRVLKLFPNEKSNGRFAEFLKLIVGNQADFKKHFELEEKAPLQFSKDTYEEELEVLLAQIGDNYAELFLSAKKLYDSILLSGILTADDSSTKAPLSASMIQRYNEHQMDLAQLKQFIRQKLSDKYNEVFSDVSKDGYAGYIDGKTNQEAFYKYLKGLLNKIEGSGYFLDKIEREDFLRKQRTFDNGSIPHQIHLQEMRAIIRRQSEFYPFLADNQDRIEKILTFRIPYYVGPLARGKSDFAWLSRKSADKITPWNFDEIVDKESSAEAFINRMTNYDLYLPNQKVLPKHSLLYEKFTVYNELTKVKYKTEQGETAFFDANMKQEIFDGVFKVYRKVTKDKLMDFLEKEFDEFRIVDLTGLDKENKAFNASYGTYHDLRKILDKDFLDNSKNEKILEDIVLTLTLFEDREMIRKRLKNYSDLLTKEQLKKLERRHYTGWGRLSAELIHGIRNKESRKTILDYLIDDGNSNRNFMQLINDDALSFKEEIAKAQVIGETDNLNQVVSDIAGSPAIKKGILQSLKIVDELVKIMGHQPENIVVEMARENQFTNQGRRNSQQRLKGLTDSIKEFGSQILKEHPVENSQLQNDRLFLYYLQNGRDMYTGEELDIDYLSQYDIDHIIPQAFIKDNSIDNRVLTSSKENRGKSDDVPSKDVVRKMKPYWSKLLSAKLITQRKFDNLTKAERGGLTDDDKAGFIKRQLVETRQITKHVARILDERFNTETDENNKKIRQVKIVTLKSNLVSNFRKEFELYKVREINDYHHAHDAYLNAVIGKALLGVYPQLEPEFVYGDYPHFHGHEENKATAKKFFYSNIMNFFKKDDVRTDKNGEIIWKKDEHISNIKKVLSYPQVNIVKKVEEQTGGFSKESILPKGNSDKLIPRKTKKFYWDTKKYGGFDSPIVAYSILVIADIEKGKSKKLKTVKALVGVTIMEKMTFERDPVAFLERKGYRNVQEENIIKLPKYSLFKLENGRKRLLASARELQKGNEIVLPNHLGTLLYHAKNIHKVDEPKHLDYVDKHKDEFKELLDVVSNFSKKYTLAEGNLEKIKELYAQNNGEDLKELASSFINLLTFTAIGAPATFKFFDKNIDRKRYTSTTEILNATLIHQSITGLYETRIDLSKLGGD

SEQ ID NO: 137 - protein, 1345 aa, Streptococcus mutans
MKKPYSIGLDIGTNSVGWAVVTDDYKVPAKKMKVLGNTDKSHIKKNLLGALLFDSGNTAEDRRLKRTARRRYTRRRNRILYLQEIFSEEMGKVDDSFFHRLDESFLTDDDKNFDSHPIFGNKAEEDAYHQKFPTIYHLRKHLADSTEKADLRLVYLALAHMIKFRGHFLIEGELNAENTDVQKLFADFVGVYDRTFDDSHLSEITVDASSILTEKISKSRRLEKLINNYPKEKKNTLFGNLIALSLGLQPNFKTNFKLSEDAKLQFSKDTYEEELEVLLAQIGDNYAELFLSAKKLYDSILLSGILTVTDVSTKAPLSASMIQRYNEHQMDLAQLKQFIRQKLSDKYNEVFSDVSKDGYAGYIDGKTNQEAFYKYLKGLLNKIEGSGYFLDKIEREDFLRKQRTFDNGSIPHQIHLQEMRAIIRRQAEFYPFLADNQDRIEKILTFRIPYYVGPLARGKSDFAWLSRKSADKITPWNFDEIVDKESSVEAFINRMTNYDLYLPNQKVLPKHSLLYEKFTVYNELTKVKYKTEQGKTAFFDANMKQEIFDGVFKVYRKVTKDKLMDFLEKEFDEFRIVDLTGLDKENKAFNASYGTYHDLRKILDKDFLDNSKNEKILEDIVLTLTLFEDREMIRKRLKNYSDLLTKEQLKKLERRHYTGWGRLSAELIHGIRNKESRKTILDYLIDDGNSNRNFMQLINDDALSFKEEIAKAQVIGETDNLNQVVSDIAGSPAIKKGILQSLKIVDELVKIMGHQPENIVVEMARENQFTNQGRRNSQQRLKGLTDSIKEFGSQILKEHPVENSQLQNDRLFLYYLQNGRDMYTGEELDIDYLSQYDIDHIIPQAFIKDNSIDNRVLTSSKENRGKSDDVPSKDVVRKMKSYWSKLLSAKLITQRKFDNLTKGERGGLTDDDKAGFIKRQLVETRQITKHVARILDERFNTETDENNKKIRQVKIVTLKSNLVSNFRKEFELYKVREINDYHHAHDAYLNAVIGKALLGVYPQLEPEFVYGDYPHFHGHKENKATAKKFFYSNIMNFFKKDDVRTDKNGEIIWKKDEYISNIKKVLSYPQVNIVKKVEEQTGGFSKESILPKGDSDKLIPRKTKKFYWDTKKYGGFDSPIVAYSILVIADIEKGKSKKLKTVKALVGVTIMEKMTFERDPVAFLERKGYRNVQEENIIKLPKYSLFKLENGRKRLLASARELQKGNEIVLPNHLGTLLYHAKNIHKVDEPKHLDYVDKHKDEFKELLDVVSNFSKKYTLAEGNLEKIKELYAQNNGEDLKELASSFINLLTFTAIGAPATFKFFDKNIDRKRYTSTTEILNATLIHQSITGLYETRIDLSKLGGD

SEQ ID NO: 138 - protein, 1345 aa, Streptococcus mutans
MKKPYSIGLDIGTNSVGWAVVTDDYKVPAKKMKVLGNTDKSHIKKNLLGALLFDSGNTAADRRLKRTARRRYTRRRNRILYLQEIFAEEMSKVDDSFFHRLEDSFLVTEDKRGERHPIFGNLEEEVKYHENFPTIYHLRQYLADNPEKVDLRLVYLALAHIIKFRGHFLIEGKFDTRNNDVQRLFQEFLAVYDNTFENSSLQEQNVQVEEILTDKISKSAKKDRVLKLFPNEKSNGRFAEFLKLIVGNQADFKKHFELEEKAPLQFSKDTYEEELEVLLAQIGDNYAELFLSAKKLYDSILLSGILTVTDVSTKAPLSASMIQRYNEHQMDLAQLKQFIRQKLSDKYNEVFSDVSKDGYAGYIDGKTNQEAFYKYLKGLLNKIEGSGYFLDKIEREDFLRKQRTFDNGSIPHQIHLQEMRAIIRRQAEFYPFLADNQDRIEKILTFRIPYYVGPLARGKSDFAWLSRKSADKITPWNFDEIVDKESSAEAFINRMTNYDLYLPNQKVLPKHSLLYEKFTVYNELTKVKYKTEQGKTAFFDANMKQEIFDGVFKVYRKVTKDKLMDFLEKEFDEFRIVDLTGLDKENKVFNASYGTYHDLCKILDKDFLDNSKNEKILEDIVLTLTLFEDREMIRKRLENYSDLLTKEQVKKLERRHYTGWGRLSAELIHGIRNKESRKTILDYLIDDGNSNRNFMQLINDDALSFKEEIAKAQVIGETDNLNQVVSDIAGSPAIKKGILQSLKIVDELVKIMGHQPENIVVEMARENQFTKQGRRNSQQRLKGLTDSIKEFGSQILKEHPVENSQLQNDRLFLYYLQNGRDMYTGEELDIDYLSQYDIDHIIPQAFIKDNSIDNRVLTSSKENRGKSDDVPSKDVVRKMKSYWSKLLSAKLITQRKFDNLTKAERGGLTDDDKAGFIKRQLVETRQITKHVARILDERFYTETDENNKKIRQVKIVTLKSNLVSNFRKEFELYKVREINDYHHAHDAYLNAVIGKALLGVYPQLEPEFVYGDYPHFHGHKENKATAKKFFYSNIMNFFKKDDVRTDKNGEIIWKKDEHISNIKKVLSYPQVNIVKKVEEQTGGFSKESILPKGNSDKLIPRKTKKFYWDTKKYGGFDSPIVAYSILVIADIEKGKSKKLKTVKALVGVTIMEKMTFERDPVAFLERKGYRNVQEENIIKLPKYSLFKLENGRKRLLASARELQKGNEIVLPNHLGTLLYHAKNIHKVDEPKHLDYVDKHKDEFKELLDVVSNFSKKYTLAEGNLEKIKELYAQNNGEDLKELASSFINLLTFTAIGAPATFKFFDKNIDRKRYTSTTEILNATLIHQSITGLYETRIDLSKLGGD

SEQ ID NO: 139 - protein, 1345 aa, Streptococcus mutans
MKKPYSIGLDIGTNSVGWAVVTDDYKVPAKKMKVLGNTDKSHIKKNLLGALLFDSGNTAADRRLKRTARRRYTRRRNRILYLQEIFAEEMSKVDDSFFHRLEDSFLVTEDKRGERHPIFGNLEEEVKYHENFPTIYHLRQYLADNPEKVDLRLVYLALAHIIKFRGHFLIEGKFDTRNNDVQRLFQEFLAVYDNTFENSSLQEQNVQVEEILTDKISKSAKKDRVLKLFPNEKSNGRFAEFLKLIVGNQADFKKHFELEEKAPLQFSKDTYEEELEVLLAQIGDNYAELFLSAKKLYDSILLSGILTVTDVSTKAPLSASMIQRYNEHQMDLAQLKQFIRQKLSDKYNEVFSDVSKDGYAGYIDGKTNQEAFYKYLKGLLNKIEGSGYFLDKIEREDFLRKQRTFDNGSIPHQIHLQEMRAIIRRQAEFYPFLADNQDRIEKILTFRIPYYVGPLARGKSDFAWLSRKSADKITPWNFDEIVDKESSAEAFINRMTNYDLYLPNQKVLPKHSLLYEKFTVYNELTKVKYKTEQGKTAFFDANMKQEIFDGVFKVYRKVTKDKLMDFLEKEFDEFRIVDLTGLDKENKAFNASYGTYHDLRKILDKDFLDNSKNEKILEDIVLTLTLFEDREMIRKRLENYSDLLTKEQVKKLERRHYTGWGRLSAELIHGIRNKESRKTILDYLIDDGNSNRNFMQLINDDALSFKEEIAKAQVIGETDNLNQVVSDIAGSPAIKKGILQSLKIVDELVKIMGHQPENIVVEMARENQFTNQGRRNSQQRLKGLTDSIKEFGSQILKEHPVENSQLQNDRLFLYYLQNGRDMYTGEELDIDYLSQYDIDHIIPQAFIKDNSIDNRVLTSSKENRGKSDDVPSKNVVRKMKSYWSKLLSAKLITQRKFDNLTKAERGGLTDDDKAGFIKRQLVETRQITKHVARILDERFHTETDENNKKIRQVKIVTLKSNLVSNFRKEFELYKVREINDYHHAHDAYLNAVIGKALLGVYPQLEPEFVYGDYPHFHGHKENKATAKKFFYSNIMNFFKKDDVRTDKNGEIIWKKDEHISNIKKVLSYPQVNIVKKVEEQTGGFSKESILPKGNSDKLIPRKTKKFYWDTKKYGGFDSPIVAYSILVIADIEKGKSKKLKTVKALVGVTIMEKMTFERDPVAFLERKGYRNVQEENIIKLPKYSLFKLENGRKRLLASARELQKGNEIVLPNHLGTLLYHAKNIHKVDEPKHLDYVDKHKDEFKELLDVVSNFSKKYTLAEGNLEKIKELYAQNNGEDLKELSSSFINLLTFTAIGAPAAFKFFDKNIDRKRYTSTTEILNATLIHQSITGLYETRIDLSKLGGD

SEQ ID NO: 140 - protein, 1336 aa, Streptococcus mutans
MKKPYSIGLDIGTNSVGWAVVTDDYKVPAKKMKVLGNTDKSHIKKNLLGALLFDSGNTAEDRRLKRTARRRYTRRRNRILYLQEIFAEEMSKVDDSFFHRLDESFLTDDDKNFDSHPIFGNKAEEDAYHQKFPTIYHLRKHLADSTEKADLRLVYLALAHMIKFRGHFLIEGELNAENTDVQKLFADFVGVYDRTFDDSHLSEITVDASSILTEKISKSRRLEKLINNYPKEKKNTLFGNLIALSLGLQPNFKTNFKLSEDAKLQFSKDTYEEDLEELLGKIGDDYADLFTLAKNLYDAILLSGILTADDSSTKAPLSASMIKRYAEHHEDLEKLKEFIKANKPELYHDIFKDETKNGYAGYIENGVKQDEFYKYLKNTLSKITGSDYFLDQIEREDFLRKQRTFDNGSIPHQIHLQEMHAILRRQGDYYPFLKENQDRIEKILTFRIPYYVGPLARKNSRFAWAEYHSDEAVTPWNFDQVIDKESSAQAFIEHMTNNDLYLPNEKVLPKHSPLYEKYTVYNELTKIKYVTEIGEAKFFDANLKQEIFDGLFKHERKVTKKKLRTFLDKNFDEFRIVDIQGLDKETETFNASYATYQDLLKVIKDKVFMDNPENAEILENIVLTLTLFEDREMIKQRLAKYADVFDKKVIDQLARRHYTGWGRLSAKLLNGIRDKQSCKTIMDYLIDDAQSNRNLMQLITDDNLTFKDDIVKAQYVDNSDDLHQVVQSLAGSPAIKKGILQSLKIVDELVKVMGKEPEQIVVEMARENQTTAKGRRNSQQRYKRLKEAIKDLNHKILKEHPTDNQALQNNRLFLYYLQNGRDMYTGESLDINRLSDYDIDHVIPQAFIKDNSIDNRVLTSSKANRGKSDDVPSEDVVNRMRPFWNKLLSSGLISQRKYNNLTKKELTLDDKAGFIKRQLVETRQITKHVARMLDERFNKEFDDNNKRIRRVKIVTLKSNLVSSFRKEFELYKVREINDYHHAHDAYLNAVVVKALLVKYPKLEPEFVYGEYPKYNSYRERKATQKMFFYSNIMNMFKSKVKLADDQIVERPMIEVNDETGEIAWDKTKHITTVKKVLSYPQVNIVKKVEEQTGGLFDPKSPLEKLVPLKKALNPEKYGGYQKPTTAYPILLIVDTKQLIPISVMDKKRFEQNPVKFLKDKGYQQIEKNNFVKLPKYTLVDIGNGIKRLWASSKEVHKGNQLVVSKKSQDLLYHAHHLDNDYSNEYVKNHYQQFDILFNEITSFSKKCKLGKEHIQKIEEAYSKERDFASIEELADGFIKLLGFTQLGATSPFSFLGIKLNQKQYTGKKDYLEATLIHQSITGLYETRIDLSKLGGD

SEQ ID NO: 141 - protein, 1345 aa, Streptococcus mutans
MKKPYSIGLDIGTNSVGWSVVTDDYKVPAKKMKVLGNTDKSHIEKNLLGALLFDSGNTAEDRRLKRTARRRYTRRRNRILYLQEIFSEEMGKVDDSFFHRLEDSFLVTEDKRGERHPIFGNLEEEVKYHENFPTIYHLRQYLADNPEKVDLRLVYLALAHIIKFRGHFLIEGKFDTRNNDVQRLFQEFLAVYDNTFENSSLQEQNVQVEEILTDKISKSAKKDRVLKLFPNEKSNGRFAEFLKLIVGNQADFKKHFELEEKAPLQFSKDTYEEELEVLLAQIGDNYAELFLSAKKLYDSILLSGILTVTDVGTKAPLSASMIQRYNEHQMDLAQLKQFIRQKLSDKYNEVFSDVSKDGYAGYIDGKTNQEAFYKYLKGLLNKIEGSGYFLDKIEREDFLRKQRTFDNGSIPHQIHLQEMRAIIRRQAEFYPFLADNQDRIEKLLTFRIPYYVGPLARGKSDFAWLSRKSADKITPWNFDEIVDKESSAEAFINRMTNYDLYLPNQKVLPKHSLLYEKFTVYNELTKVKYKTEQGKTAFFDANMKQEIFDGVFKVYRKVTKDKLMDFLEKEFDEFRIVDLTGLDKENKVFNASYGTYHDLCKILDKDFLDNSKNEKILEDIVLTLTLFEDREMIRKRLENYSDLLTKEQVKKLERRHYTGWGRLSAELIHGIRNKESRKTILDYLIDDGNSNRNFMQLINDDALSFKEEIAKAQVIGETDNLNQVVSDIAGSPAIKKGILQSLKIVDELVKIMGHQPENIVVEMARENQFTNQGRRNSQQRLKGLTDSIKEFGSQILKEHPVENSQLQNDRLFLYYLQNGRDMYTGEELDIDYLSQYDIDHIIPQAFIKDNSIDNRVLTSSKENRGKSDDVPSKDVVRKMKSYWSKLLSAKLITQRKFDNLTKAERGGLTDDDKAGFIKRQLVETRQITKHVARILDERFNTETDENNKKIRQVKIVTLKSNLVSNFRKEFELYKVREINDYHHAHDAYLNAVIGKALLGVYPQLEPEFVYGDYPHFHGHKENKATAKKFFYSNIMNFFKKDDVRIDKNGEIIWKKDEHISNIKKVLSYPQVNIVKKVEEQTGGFSKESILPKGNSDKLIPRKTKKFYWDTKKYGGFDSPIVAYSILVIADIEKGKSKKLKTVKALVGVTIMEKMTFERDPVAFLERKGYRNVQEENIIKLPKYSLFKLENGRKRLLASARELQKGNEIVLPNHLGTLLYHAKNIHKVDEPKHLDYVDKHKDEFKELLDVVSNFSKKYTLAEGNLEKIKELYAQNNGEDLKELASSFINLLTFTAIGAPATFKFFDKNIDRKRYTSTTEILNATLIHQSITGLYETRIDLSKLGGD

SEQ ID NO: 142 - protein, 1345 aa, Streptococcus mutans
MKKPYSIGLDIGTNSVGWAVVTDDYKVPAKKMKVLGNTDKSHIKKNLLGALLFDSGNTAEDRRLKRTARRRYTRRRNRILYLQEIFSEEMGKVDDSFFHRLEDSFLVTEDKRGERHPIFGNLEEEVKYHENFPTIYHLRQYLADNPEKTDLRLVYLALAHIIKFRGHFLIEGKFDTRNNDVQRLFQEFLAVYDNTFENSSLQEQNVQVEEILTDKISKSAKKDRVLKLFPNEKSNGRFAEFLKLIVGNQADFKKHFELEEKAPLQFSKDIYEEELEVLLAQIGDNYAELFLSAKKLYDSILLSGILTVTDVSTKAPLSASMIQRYNEHQMDLAQLKQFIRQKLSDKYNEVFSDVSKDGYAGYIDGKTNQEAFYKYLKGLLNKIEGSGYFLDKIEREDFLRKQRTFDNGSIPHQIHLQEMRAIIRRQAEFYPFLADNQDRIEKILTFRIPYYVGPLARGKSDFAWLSRKSADKITPWNFDEIVDKESSVEAFINRMTNYDLYLPNQKVLPKHSLLYEKFTVYNELTKVKYKTEQGKTAFFDANMKQEIFDGVFKVYRKVTKDKLMDFLEKEFDEFRIVDLTGLDKENKAFNASYGTYHDLRKILDKDFLDNSKNEKILEDIVLTLTLFEDREMIRKRLKNYSDLLTKEQLKKLERRHYTGWGRLSAELIHGIRNKESRKTILDYLIDDGNSNRNFMQLINDDALSFKEEIAKAQVIGETDNLNQVVSDIAGSPAIKKGILQSLKIVDELVKIMGHQPENIVVEMARENQFTNQGRRNSQQRLKGLTDSIKEFGSQILKEHPVENSQLQNDRLFLYYLQNGRDMYTGEELDIDYLSQYDIDHIIPQAFIKDNSIDNRVLTSSKENRGKSDDVPSKNVVRKMKSYWSKLLSAKLITQRKFDNLTKAERGGLTDDDKAGFIKRQLVETRQITKHVARILDERFHTETDENNKKIRQVKIVTLKSNLVSNFRKEFELYKVREINDYHHAHDAYLNAVIGKALLGVYPQLEPEFVYGDYPHFHGHKENKATAKKFFYSNIMNFFKKDDVRTDKNGEIIWKKDEHISNIKKVLSYPQVNIVKKVEEQTGGFSKESILPKGNSDKLIPRKTKKFYWDTKKYGGFDSPIVAYSILVIADIEKGKSKKLKTVKALVGVTIMEKMTFERDPVAFLERKGYRNVQEENIIKLPKYSLFKLENGRKRLLASARELQKGNEIVLPNHLGTLLYHAKNIHKVDEPKHLDYVDKHKDEFKELLDVVSNFSKKYTLAEGNLEKIKELYAQNNGEDLKELASSFINLLTFTAIGAPATFKFFDKNIDRKRYTSTTEILNATLIHQSITGLYETRIDLSKLGGD

SEQ ID NO: 143 - protein, 1345 aa, Streptococcus mutans
MKKPYSIGLDIGTNSVGWAVVTDDYKVSAKKMKVLGNTDKSHIKKNLLGALLFDSGNTAEDRRLKRTARRRYTRRRNRILYLQEIFAEEMSKVDDSFFHRLEDSFLVTEDKRGERHPIFGNLEEEVKYHENFPTIYHLRQYLADNPEKVDLRLVYLALAHIIKFRGHFLIEGKFDTRNNDVQRLFQEFLAVYDNTFENSSLQEQNVQVEEILTDKISKSAKKDRVLKLFPNEKSNGRFAEFLKLIVGNQADFKKHFELEEKAPLQFSKDTYEEELEVLLAQIGDNYAELFLSAKKLYDSILLSGILTVTDVSTKAPLSASMIQRYNEHQMDLAQLKQFIRQKLSDKYNEVFSDVSKDGYAGYIDGKTNQEAFYKYLKGLLNKIEGSGYFLDKIEREDFLRKQRTFDNGSIPHQIHLQEMRAIIRRQAEFYPFLADNQDRIEKILTFRIPYYVGPLARGKSDFAWLSRKSADKITPWNFDEIVDKESSAEAFINRMTNYDLYLPNQKVLPKHSLLYEKFTVYNELTKVKYKTEQGKTAFFDANMKQEIFDGVFKVYRKVTKDKLMDFLEKEFDEFRIVDLTGLDKENKAFNASYGTYHDLRKILDKDFLDNSKNEKILEDIVLTLTLFEDREMIRKRLENYSDLLTKEQVKKLERRHYTGWGRLSAELIHGIRNKESRKTILDYLIDDGNSNRNFMQLINDDALSFKEEIAKAQVIGETDNLNQVVSDIAGSPAIKKGILQSLKIVDELVKIMGHQPENIVVEMARENQFTNQGRRNSQQRLKGLTDSIKEFGSQILKEHPVEHSQLQNDRLFLYYLQNGRDMYTGEELDIDYLSQYDIDHIIPQAFIKDNSIDNRVLTSSKENRGKSDDVPSKNVVRKMKSYWSKLLSAKLITQRKFDNLTKAERGGLTDDDKAGFIKRQLVETRQITKHVARILDERFHTETDENNKKIRQVKIVTLKSNLVSNFRKEFELYKVREINDYHHTHDAYLNAVIGKALLGVYPQLEPEFVYGDYPHFHGHKENKATAKKFFYSNIMNFFKKDDVRTDKNGEIIWKKDEHISNIKKVLSYPQVNIVKKVEEQTGGFSKESILPKGNSDKLIPRKTKKFYWDTKKYGGFDSPIVAYSILVIADIEKGKSKKLKTVKALVGVTIMEKMTFERDPVAFLERKGYRNVQEENIIKLPKYSLFKLENGRKRLLASARELQKGNEIVLPNHLGTLLYHAKNIHKVDEPKHLDYVDKHKDEFKELLDVVSNFSKKYTLAEGNLEKIKELYAQNNGEDLKELASSFINLLTFTAIGAPATFKFFDKNIDRKRYTSTTEILNATLIHQSITGLYETRIDLSKLGGD

SEQ ID NO: 144 - protein, 1345 aa, Streptococcus mutans
MKKPYSIGLDIGTNSVGWAVVTDDYKVPAKKMKVLGNTDKSHIKKNLLGALLFDSGNTAEDRRLKRTARRRYTRRRNRILYLQEIFSEEMGKVDDSFFHRLEDSFLVTEDKRGERHPIFGNLEEEVKYHENFPTIYHLRQYLADNPEKTDLRLVYLALAHIIKFRGHFLIEGKFDTRNNDVQRLFQEFLAVYDNTFENSSLQEQNVQVEEILTDKISKSAKKDRVLKLFPNEKSNGRFAEFLKLIVGNQADFKKHFELEEKAPLQFSKDIYEEELEVLLAQIGDNYAELFLSAKKLYDSILLSGILTVTDVSTKAPLSASMIQRYNEHQMDLAQLKQFIRQKLSDKYNEVFSDVSKDGYAGYIDGKTNQEAFYKYLKGLLNKIEGSGYFLDKIEREDFLRKQRTFDNGSIPHQIHLQEMRAIIRRQAEFYPFLADNQDRIEKILTFRIPYYVGPLARGKSDFAWLSRKSADKITPWNFDEIVDKESSVEAFINRMTNYDLYLPNQKVLPKHSLLYEKFTVYNELTKVKYKTEQGKTAFFDANMKQEIFDGVFKVYRKVTKDKLMDFLEKEFDEFRIVDLTGLDKENKAFNASYGTYHDLRKILDKDFLDNSKNEKILEDIVLTLTLFEDREMIRKRLKNYSDLLTKEQLKKLERRHYTGWGRLSAELIHGIRNKESRKTILDYLIDDGNSNRNFMQLINDDALSFKEEIAKAQVIGETDNLNQVVSDIAGSPAIKKGILQSLKIVDELVKIMGHQPENIVVEMARENQFTNQGRRNSQQRLKGLTDSIKEFGSQILKEHPVENSQLQNDRLFLYYLQNGRDMYTGEELDIDYLSQYDIDHIIPQAFIKDNSIDNRVLTSSKENRGKSDDVPSKDVVRKMKSYWSKLLSAKLITQRKFDNLTKAERGGLTDDDKAGFIKRQLVETRQITKHVARILDERFNTETDENNKKIRQVKIVTLKSNLVSNFRKEFELYKVREINDYHHAHDAYLNAVIGKALLGVYPQLEPEFVYGDYPHFHGHKENKATAKKFFYSNIMNFFKKDDVRTDKNGEIIWKKDEHISNIKKVLSYPQVNIVKKVEEQTGGFSKESILPKGNSYKLIPRKTKKFYWDTKKYGGFDSPIVAYSILVIADIEKGKSKKLKTVKALVGVTIMEKMTFERDPVAFLERKGYRNVQEENIIKLPKYSLFKLENGRKRLLASARELQKGNEIVLPNHLGTLLYHAKNIHKVDEPKHLDYVDKHKDEFKELLDVVSNFSKKYTLAEGNLEKIKELYAQNNGEDLKELASSFINLLTFTAIGAPAAFKFFDKNIDRKRYTSTTEILNATLIHQSITGLYETRIDLSKLGGD

SEQ ID NO: 145 - protein, 1345 aa, Streptococcus mutans
MKKPYSIGLDIGTNSVGWAVVTDDYKVPAKKMKVLGNTDKSHIKKNLLGALLFDSGNTAEDRRLKRTTRRRYTRRRNRILYLQEIFSEEMGKVDDSFFHRLEDSFLVTEDKRGERHPIFGNLEEEVKYHENFPTIYHLRQYLADNPEKTDLRLVYLALAHIIKFRGHFLIEGKFDTRNNDVQRLFQEFLAVYDNTFENSSLQEQNVQVEEILTDKISKSAKKDRVLKLFPNEKSNGCFAEFLKLIVGNQADFKKHFELEEKAPLQFSKDTYEEELEVLLAQIGDNYAELFLSAKKLYDSILLSGILTVTDVSTKAPLSASMIQRYNEHQMDLTQLKQFIRQKLSDKYNEVFSDVSKDGYAGYIDGKTNQEAFYKYLKGLLNKIEGSGYFLDKIEREDFLRKQRTFDNGSIPHQIHLQEMRAIIRRQAEFYPFLADNQDRIEKLLTFRIPYYVGPLASGKSDFAWLSRKSADKITPWNFDEIVDKESSAEAFINRMTNYDLYLPNQKVLPKHSLLYEKFTVYNELTKVKYKTEQGKTAFFDANMKQEIFDGVFKVYRKVTKDKLMDFLEKEFDEFRIVDLTGLDKENKVFNASYGTYHDLCKILDKDFLDNSKNEKILEDIVLTLTLFEDREMIRKRLENYSDLLTKEQVKKLERRHYTGWGRLSAELIHGIRNKESRKTILDYLIDDGNSNRNFMQLINDDALSFKEEIAKAQVIGETDNLNQVVSDIAGSPAIKKGILQSLKIVDELVKIMGHQPENIVVEMARENQFTNQGRRNSQQRLKGLTDSIKEFGSQILKEHPVENSQLQNDRLFLYYLQNGRDMYTGEELDIDYLSQYDIDHIIPQAFIKDNSIDNRVLTSSKENRGKSDDVPSKDVVRKMKSYWSKLLSAKLITQRKFDNLTKAERGGLTDDDKAGFIKRQLVETRQITKHVARILDERFNTETDENNKKIRQVKIVTLKSNLVSNFRKEFELYKVREINDYHHAHDAYLNAVIGKALLGVYPQLEPEFVYGDYPHFHGHKENKATAKKFFYSNIMNFFKKDDVRTDKNGEIIWKKDEHISNIKKVLSYPQVNIVKKVEEQTGGFSKESILPKGNSDKLIPRKTKKFYWDTKKYGGFDSPIVAYSILVIADIEKGKSKKLKTVKALVGVTIMEKMTFERDPVAFLERKGYRNVQEENIIKLPKYSLFKLENGRKRLLASARELQKGNEIVLPNHLGTLLYHAKNIHKVDEPKHLDYVDKHKDEFKELLDVVSNFSKKYTLAEGNLEKIKELYAQNNGEDLKELASSFINLLTFTAIGAPATFKFFDKNIDRKRYTSTTEILNATLIHQSITGLYETRIDLSKLGGD

SEQ ID NO: 146 - protein, 1345 aa, Streptococcus mutans
MKKPYSIGLDIGTNSVGWAVVTDDYKVPAKKMKVLGNTDKSHIKKNLLGALLFDSGNTAEDRRLKRTARRRYTRRRNRILYLQEIFSEEMGKVDDSFFHRLEDSFLVTEDKRGERHPIFGNLEEEVKYHENFPTIYHLRQYLADNPEKTDLRLVYLALAHIIKFRGHFLIEGKFDTRNNDVQRLFQEFLAVYDNTFENSSLQEQNVQVEEILTDKISKSAKKDRVLKLFPNEKSNGRFAEFLKLIVGNQADFKKHFELEEKAPLQFSKDIYEEELEVLLAQIGDNYAELFLSAKKLYDSILLSGILTVTDVSTKAPLSASMIQRYNEHQMDLAQLKQFIRQKLSDKYNEVFSDVSKDGYAGYIDGKTNQEAFYKYLKGLLNKIEGSGYFLDKIEREDFLRKQRTFDNGSIPHQIHLQEMRAIIRRQAEFYPFLADNQDRIEKILTFRIPYYVGPLARGKSDFAWLSRKSADKITPWNFDEIVDKESSAEAFINRMTNYDLYLPNQKVLPKHSLLYEKFTVYNELTKVKYKTEQGKTAFFDANMKQEIFDGVFKVYRKVTKDKLMDFLEKEFDEFRIVDLTGLDKENKAFNASYGTYHDLRKILDKDFLDNSKNEKILEDIVLTLTLFEDREMIRKRLKNYSDLLTKEQLKKLERRHYTGWGRLSAELIHGIRNKESRKTILDYLIDDGNSNRNFMQLINDDALSFKEEIAKAQVIGETDNLNQVVSDIAGSLAIKKGILQSLKIVDELVKIMGHQPENIVVEMARENQFTNQGRRNSQQRLKGLTDSIKEFGSQILKEHPVENSQLQNDRLFLYYLQNGRDMYTGEELDIDYLSQYDIDHIIPQAFIKDNSIDNRVLTSSKENRGKSDDVPSKDVVRKMKSYWSKLLSAKLITQRKFDNLTKGERGGLTDDDKAGFIKRQLVETRQITKHVARILDERFNTETDENNKKIRQVKIVTLKSNLVSNFRKEFELYKVREINDYHHAHDAYLNAVIGKALLGVYPQLEPEFVYGDYPHFHGHKENKATAKKFFYSNIMNFFKKDDVRTDKNGEIIWKKDEYISNIKKVLSYPQVNIVKKVEEQTGGFFKESILPKGDSDKLIPRKTKKFYWDTKKYGGFDSPIVAYSILVIADIEKGKSKKLKTVKALVGVTIMEKMTFERDPVAFLERKGYRNVQEENIIKLPKYSLFKLENGRKRLLASARELQKGNEIVLPNHLGTLLYHAKNIHKVDEPKHLDYVDKHKDEFKELLDVVSNFSKKYTLAEGNLEKIKELYAQNNGEDLKELASSFINLLTFTAIGAPATFKFFDKNIDRKRYTSTTEILNATLIHQSITGLYETRIDLSKLGGD

SEQ ID NO: 147 - protein, 1345 aa, Streptococcus mutans
MKKPYSIGLDIGTNSVGWAVVTDDYKVPAKKMKVLGNTDKSHIKKNLLGALLFDSGNTAEDRRLKRTARRRYTRRRNRILYLQEIFSEEMGKVNDSFFHRLEDSFLVTEDKRGERHPIFGNLEEEVKYHENFPTIYHLRQYLADNPEKVDLRLVYLALAHIIKFRGHFLIEGKFDTRNNDVQRLFQEFLAVYDNTFENSSLQEQNVQVEEILTDKISKSAKKDRVLKLFPNEKSNGRFAEFLKLIVGNQADFKKHFELEEKAPLQFSKDTYEEELEVLLAQIGDNYAELFLSAKKLYDSILLSGILTVTDVSTKAPLSASMIQRYNEHQMDLAQLKQFIRQKLSDKYNEVFSDVSKDGYAGYIDGKTNQEAFYKYLKGLLNKIEGSGYFLDKIEREDFLRKQRTFDNGSIPHQIHLQEMRAIIRRQAEFYPFLADNQDRIEKILTFRIPYYVGPLARGKSDFAWLSRKSADKITPWNFDEIVDKESSAEAFINRMTNYDLYLPNQKVLPKHSLLYEKFTVYNELTKVKYKTEQGKTAFFDANMKQEIFDGVFKVYRKVTKDKLMDFLEKEFDEFRIVDLTGLDKENKVFNASYGTYHDLCKILDKDFLDNSKNEKILEDIVLTLTLFEDREMIRKRLENYSDLLTKEQVKKLERRHYTGWGRLSAELIHGIRNKESRKTILDYLIDDGNSNRNFMQLINDDALSFKEEIAKAQVIGETDNLNQVVSDIAGSPAIKKGILQSLKIVDELVKIMGHQPENIVVEMARENQFTKQGRRNSQQRLKGLTDSIKEFGSQILKEHPVENSQLQNDRLFLYYLQNGRDMYTGEELDIDYLSQYDIDHIIPQAFIKDNSIDNRVLTSSKENRGKSDDVPSKDVVRKMKSYWSKLLSAKLITQRKFDNLTKAERGGLTDDDKAGFIKRQLVETRQITKHVARILDERFYTETDENNKKIRQVKIVTLKSNLVSNFRKEFELYKVREINDYHHAHDAYLNAVIGKALLGVYPQLEPEFVYGDYPHFHGHKENKATAKKFFYSNIMNFFKKDDVRTDKNGEIIWKKDEYISNIKKVLSYPQVNIVKKVEEQTGGFSKESILPKGNSDKLIPRKTKKFYWDTKKYGGFDSPIVAYSILVIADIEKGKSKKLKTVKALVGVTIMEKMTFERDPIAFLERKGYRNVQEENIIKLPKYSLFKLENGRKRLLASARELQKGNEIVLPNHLGTLLYHAKNIHKVDEPKHLDYVDKHKDEFKELLDVVSNFSKKYTLAEGNLEKIKELYAQNNGEDLKELASSFINLLTFTAIGAPAAFKFFDKNIDRKRYTSTTEILNATLIHQSITGLYETRIDLSKLGGD

SEQ ID NO: 148 - protein, 1345 aa, Streptococcus mutans
MKKPYSIGLDIGTNSVGWAVVTDDYKVPAKKMKVLGNTDKSHIKKNLLGALLFDSGNTAEDRRLKRTARRRYTRRRNRILYLQEIFSEEMGKVDDSFFHRLEDSFLVTEDKRGERHPIFGNLEEEVKYHENFPTIYHLRQYLADNPEKTDLRLVYLALAHIIKFGGHFLIEGKFDTRNNDVQRLFQEFLAVYDNTFENSSLQEQNVQVEEILTDKISKSAKKDRVLKLFPNEKSNGRFAEFLKLIVGNQADFKKHFELEEKAPLQFSKDIYEEELEVLLAQIGDNYAELFLSAKKLYDSILLSGILTVTDVSTKAPLSASMIQRYNEHQMDLAQLKQFIRQKLSDKYNEVFSDVSKDGYAGYIDGKTNQEAFYKYLKGLLNKIEGSGYFLDKIEREDFLRKQRTFDNGSIPHQIHLQEMRAIIRRQAEFYPFLADNQDRIEKILTFRIPYYVGPLARGKSDFAWLSRKSADKITPWNFDEIVDKESSVEAFINRMTNYDLYLPNQKVLPKHSLLYEKFTVYNELTKVKYKTEQGKTAFFDANMKQEIFDGVFKVYRKVTKDKLMDFLEKEFDEFRIVDLTGLDKENKAFNASYGTYHDLRKILDKDFLDNSKNEKILEDIVLTLTLFEDREMIRKRLKNYSDLLTKEQLKKLERRHYTGWGRLSAELIHGIRNKESRKTILDYLIDDGNSNRNFMQLINDDALSFKEEIAKAQVIGETDNLNQVVSDIAGSPAIKKGILQSLKIVDELVKIMGHQPENIVVEMARENQFTNQGRRNSQQRLKGLTDSIKEFGSQILKEHPVENSQLQNDRLFLYYLQNGRDMYTGEELDIDYLSQYDIDHIIPQAFIKDNSIDNRVLTSSKENRGKSDDVPSKNVVRKMKSYWSKLLSAKLITQRKFDNLTKAERGGLTDDDKAGFIKRQLVETRQITKHVARILDERFHTETDENNKKIRQVKIVTLKSNLVSNFRKEFELYKVREINDYHHAHDAYLNAVIGKALLGVYPQLEPEFVYGDYPHFHGHKENKATAKKFFYSNIMNFFKKDDVRTDKNGEIIWKKDEHISNIKKVLSYPQVNIVKKVEEQTGGFSKESILPKGNSDKLIPRKTKKFYWDTKKYGGFDSPIVAYSILVIADIEKGKSKKLKTVKALVGVTIMEKMTFERDPVAFLERKGYRNVQEENIIKLPKYSLFKLENGRKRLLASARELQKGNEIVLPNHLGTLLYHAKNIHKVDEPKHLDYVDKHKDEFKELLDVVSNFSKKYTLAEGNLEKIKELYAQNNGEDLKELASSFINLLTFTAIGAPATFKFFDKNIDRKRYTSTTEILNATLIHQSITGLYETRIDLSKLGGD

SEQ ID NO: 149 - protein, 1345 aa, Streptococcus mutans
MKKPYSIGLDIGTNSVGWAVVTDDYKVPAKKMKVLGNTDKSHIKKNLLGALLFDSGNTAEDRRLKRTARRRYTRRRNRILYLQEIFAEEMMQVDESFFQRLDDSFLVEEDKRGSRYPIFGTLKEEKKYHKEFKTIYHLREKLANSTEKADLRLVYLSLAHMIKFRGHFLIEGQLKAENTNVQALFKDFVEVYDKTVEESHLSEMTVDALSILTEKVSKSRRLENLVECYPTEKKNTLFGNLIALSLGLQPNFKTNFQLSEDAKLQFSKDTYEEDLEGLLGEIGDEYADLFASAKNLYDAILLSGILAVDDNTTKAPLSASMVKRYKEHKEELAAFKRFIKEKLPKKYEEIFKDDTKNGYAGYVGADATEEEFYKYVKGILNKVEGADVWLDKIDREDFLRKQRTFDNGSIPHQIHLQEMHAILRRQGEHYPFLKENQDKIEKILTFRIPYYVGPLVRKGSRFAWAEYKADEKITPWNFDDILDKEKSAEKFITRMTLNDLYLPEEKVLPKHSLLYETFTVYNELTKVKYVNEQGEAKFFDANMKQEIFDHVFKENRKVTKDKLLNYLNKEFEEFRIVNLTGLDKENKVFNSSLGTYHDLRKILNKSFLDNKENEQIIEDIIQTLTLFEDREMIRQRLQKYSDIFTKAQLKKLERRHYTGWGRLSYKLINGIRDKQSNKTILGYLIDDGYSNRNFMQLINDDALSFKEEIAKAQVIGEMDGLNQVVSDIAGSPAIKKGILQSLKIVDELVKVMGHNPANIVIEMARENQTTAKGRRSSQKRYKRLEEAIKDLNHKILKEHPTDNQALQNDRLFLYYLQNGRDMYTEDPLDINRLSDYDIDHIIPQAFIKDNSIDNRVLTRSDKNRGKSDDVPSEEVVHKMKPFWSKLLSAKLITQRKFDNLTKAERGGLTDDDKAGFIKRQLVETRQITKHVARILDERFNTETDENNKKIRQVKIVTLKSNLVSNFRKEFELYKVREINDYHHAHDAYLNAVIGKALLGVYPQLEPEFVYGDYPHFHGHKENKATAKKFFYSNIMNFFKKGDVRTDKNGEIIWKKDEHISNIKKVLSYPQVNIVKKVEEQTGGFSKESILPKGNSDKLIPRKTKKFYWDTKKYGGFDSPIVAYSILVIADIEKGKSKKLKTVKALVGVTIMEKMTFERDPVAFLERKGYRNVQEENIIKLPKYSLFKLENGRKRLLASARELQKGNEIVLPNHLETLLYHAKNIHKVDEPKHLDYVDKHKDEFKELLDVVSNFSKKYTLAEGNLEKIKELYAQNNGEDLKELASSFINLLTFTAIGAPAAFKFFDKNIDRKRYTSTTEILNATLIHQSITGLYETRIDLNKLGGD

SEQ ID NO: 150 - protein, 1345 aa, Streptococcus mutans
MKKPYSIGLDIGTNSVGWAVVTDDYKVPAKKMKVLGNTDKSHIKKNLLGALLFDSGNTAEDRRLKRTARRRYTRRRNRILYLQEIFSEEMDKVDDSFFHRLEDSFLVTEDKRGERHPIFGNLEEEVKYHENFPTIYHLRQYLADNPEKVDLRLVYLALAHIIKFRGHFLIEGKFDTRNNDVQRLFQEFLAVYDNTFENSSLQEQNVQVEEILTDKISKSAKKDRVLKLFPNEKSNGRFAEFLKLIVGNQADFKKHFELEEKAPLQFSKDTYEEELEVLLAQIGDNYAELFLSAKKLYDSILLSGILTVTDVSTKAPLSASMIQRYNEHQMDLAQLKQFIRQKLSDKYNEVFSDVSKDGYAGYIDGKTNQEAFYKYLKGLLNKIEGSGYFLDKIEREDFLRKQRTFDNGSIPHQIHLQEMRAIIRRQAEFYPFLADNQDRIEKILTFRIPYYVGPLARGKSDFAWLSRKSADKITPWNFDEIVDKESSAEAFINRMTNYDLYLPNQKVLPKHSLLYEKFTVYNELTKVKYKTEQGKTAFFDANMKQEIFDGVFKVYRKVTKDKLMDFLEKEFDEFRIVDLTGLDKENKVFNASYGTYHDLCKILDKDFLDNSKNEKILEDIVLTLTLFEDREMIRKRLENYSDLLTKEQVKKLERRHYTGWGRLSAELIHGIRNKESRKTILDYLIDDGNSNRNFMQLINDDALSFKEEIAKAQVIGETDNLNQVVSDIAGSPAIKKGILQSLKIVDELVKIMGHQPENIVVEMARENQFTKQGRRNSQQRLKGLTDSIKEFGSQILKEHPVENSQLQNDRLFLYYLQNGRDMYTGEELDIDYLSQYDIDHIIPQAFIKDNSIDNRVLTSSKENRGKSDDVPSKDVVRKMKSYWSKLLSAKLITQRKFDNLTKAERGGLTDDDKAGFIKRQLVETRQITKHVARILDERFYTETDENNKKIRQVKIVTLKSNLVSNFRKEFELYKVREINDYHHAHDAYLNAVIGKALLGVYPQLEPEFVYGDYPHFHGHKENKATAKKFFYSNIMNFFKKDDVRTDKNGEIIWKKDEHISNIKKVLSYPQVNIVKKVEEQTGGFSKESILPKGNSDKLIPRKTKKFYWDTKKYGGFDSPIVAYSILVIADIEKGKSKKLKTVKALVGVTIMEKMTFERDPVAFLERKGYRNVQEENIIKLPKYSLFKLENGRKRLLASARELQKGNEIVLPNHLGTLLYHAKNIHKVDEPKHLDYVDKHKDEFKELLDVVSNFSKKYTLAEGNLEKIKELYAQNNGEDLKELASSFINLLTFTAIGAPATFKFFDKNIDRKRYTSTTEILNATLIHQSITGLYETRIDLSKLGGD

SEQ ID NO: 151 - protein, 1345 aa, Streptococcus mutans
MKKPYSIGLDIGTNSVGWAVVTDDYKVPAKKMKVLGNTDKSHIKKNLLGALLFDSGNTAEDRRLKRTARRRYTRRRNRILYLQEIFSEEMGKVDDSFFHRLEDSFLVTEDKRGERHPIFGNLEEEVKYHENFPTIYHLRQYLADNPEKVDLRLVYLALAHIIKFRGHFLIEGKFDTRNNDVQKLFQEFLAVYDNTFENSSLQEQNVQVEEILTDKISKSAKKDRVLKLFPNEKSNGRFAEFLKLIVGNQADFKKHFELEEKAPLQLSKDTYEEELEVLLAQIGDNYAELFLSAKKLYDSILLSGILTVTDVSTKAPLSASMIQRYNEHQMDLAQLKQFIRQKLSDKYNEVFSDVSKDGYAGYIDGKTNQEAFYKYLKGLLNKIEGSGYFLDKIEREDFLRKQRTFDNGSIPHQIHLQEMRAIIRRQAEFYPFLADNQDRIEKILTFRIPYYVGPLARGKSDFAWLSRKSADKITPWNFDEIVDKESSVEAFINRMTNYDLYLPNQKVLPKHSLLYEKFTVYNELTKVKYKTEQGKTAFFDANMKQEIFDGVFKVYRKVTKDKLMDFLEKEFDEFRIVDLTGLDKENKAFNASYGTYHDLRKILDKDFLDNSKNEKILEDIVLTLTLFEDREMIRKRLENYSDLLTKEQVKKLERRHYTGWGRLSAELIHGIRNKESRKTLLDYLIDDGNSNRNFMQLINDDALSFKEEIAKAQVIGETDNLNQVVSDIAGSPAIKKGILQSLKIVDELVKIMGHQPENIVVEMARENQFTNQGRRNSQQRLKGLTDSIKEFGSQILKEHPVENSQLQNDRLFLYYLQNGRDMYTGEELDIDYLSQYDIDHIIPQAFIKDNSIDNRVLTSSKENRGKSDDVPSKDVVRKMKSYWSKLLSAKLITQRKFDNLTKAERGGLTDDDKAGFIKRQLVETRQITKHVARILDERFNTETDENNKKIRQVKIVTLKSNLVSNFRKEFELYKVREINDYHHAHDAYLNAVIGKALLGVYPQLEPEFVYGDYPHFHGHKENKATAKKFFYSNIMNFFKKDDVRTDKNGEIIWKKDEYISNIKKVLSYPQVNIVKKVEEQTGGFSKESILPKGNSDKLIPRKTKKFYWDTKKYGGFDSPIVAYSILVIADIEKGKSKKLKTVKALVGVTIMEKMTFERDPIAFLERKGYRNVQEENIIKLPKYSLFKLENGRKRLLASARELQKGNEIVLPNHLGTLLYHAKNIHKVDEPKHLDYVDKHKDEFKELLDVVSNFSKKYTLAEGNLEKIKELYAQNNGEDLKELASSFINLLTFTAIGAPATFKFFDKNIDRKRYTSTTEILNATLIHQSITGLYETRIDLSKLGGD

SEQ ID NO: 152 - protein, 1345 aa, Streptococcus mutans
MKKPYSIGLDIGTNSVGWAVVTDDYKVPAKKMKVLGNTDKSHIKKNLLGALLFDSGNTAEDRRLKRTARRRYTRRRNRILYLQEIFSEEMGKVDDSFFHRLEDSFLVTEDKRGERHPIFGNLEEEVKYHENFPTIYHLRQYLADNPEKTDLRLVYLALAHIIKFRGHFLIEGKFDTRNNDVQRLFQEFLAVYDNTFENSSLQEQNVQVEEILTDKISKSAKKDRVLKLFPNEKSNGRFAEFLKLIVGNQADFKKHFELEEKAPLQFSKDIYEEELEVLLAQIGDNYAELFLSAKKLYDSILLSGILTVTDVSTKAPLSASMIQRYNEHQMDLAQLKQFIRQKLSDKYNEVFSDVSKDGYAGYIDGKTNQEAFYKYLKGLLNKIEGSGYFLDKIEREDFLRKQRTFDNGSIPHQIHLQEMRAIIRRQAEFYPFLADNQDRIEKILTFRIPYYVGPLARGKSDFAWLSRKSADKITPWNFDEIVDKESSAEAFINRMTNYDLYLPNQKVLPKHSLLYEKFTVYNELTKVKYKTEQGKTAFFDANMKQEIFDGVFKVYRKVTKDKLMDFLEKEFDEFRIVDLTGLDKENKAFNASYGTYHDLRKILDKDFLDNSKNEKILEDIVLTLTLFEDREMIRKRLKNYSDLLTKEQLKKLERRHYTGWGRLSAELIHGIRNKESRKTILDYLIDDGNSNRNFMQLINDDALSFKEEIAKAQVIGETDNLNQVVSDIAGSLAIKKGILQSLKIVDELVKIMGHQPENIVVEMARENQFTNQGRRNSQQRLKGLTDSIKEFGSQILKEHPVENSQLQNDRLFLYYLQNGRDMYTGEELDIDYLSQYDIDHIIPQAFIKDNSIDNRVLTSSKENRGKSDDVPSKDVVRKMKSYWSKLLSAKLITQRKFDNLTKGERGGLTDDDKAGFIKHQLVETRQITKHVARILDERFNTETDENNKKIRQVKIVTLKSNLVSNFRKEFELYKVREINDYHHAHDAYLNAVIGKALLGVYPQLEPEFVYGDYPHFHGHKENKATAKKFFYSNIMNFFKKDDVRTDKNGEIIWKKDEYISNIKKVLSYPQVNIVKKVEEQTGGFFKESILPKGDSDKLIPRKTKKFYWDTKKYGGFDSPIVAYSILVIADIEKGKSKKLKTVKALVGVTIMEKMTFERDPVAFLERKGYRNVQEENIIKLPKYSLFKLENGRKRLLASARELQKGNEIVLPNHLGTLLYHAKNIHKVDEPKHLDYVDKHKDEFKELLDVVSNFSKKYTLAEGNLEKIKELYAQNNGEDLKELASSFINLLTFTAIGAPATFKFFDKNIDRKRYTSTTEILNATLIHQSITGLYETRIDLSKLGGD

SEQ ID NO: 153 - protein, 1345 aa, Streptococcus mutans
MKKPYSIGLDIGTNSVGWAVVTDDYKVPAKKMKVLGNTDKSHIKKNLLGALLFDSGNTAEDRRLKRTARRRYTRRRNRILYLQEIFSEEMGKVDDSFFHRLEDSFLVTEDKRGERHPIFGNLEEEVKYHENFPTIYHLRQYLADNPEKTDLRLVYLALAHIIKFRGHFLIEGKFDTRNNDVQRLFQEFLAVYDNTFENSSLQEQNVQVEEILTDKISKSAKKDRVLKLFPNEKSNGRFAEFLKLIVGNQADFKKHFELEEKAPLQFSKDIYEEELEVLLAQIGDNYAELFLSAKKLYDSILLSGILTVTDVSTKAPLSASMIQRYNEHQMDLAQLKQFIRQKLSDKYNEVFSDVSKDGYAGYIDGKTNQEAFYKYLKGLLNKIEGSGYFLDKIEREDFLRKQRTFDNGSIPHQIHLQEMRAIIRRQAEFYPFLADNQDRIEKILTFRIPYYVGPLARGKSDFAWLSRKSADKITPWNFDEIVDKESSAEAFINRMTNYDLYLPNQKVLPKHSLLYEKFTVYNELTKVKYKTEQGKTAFFDANMKQEIFDGVFKVYRKVTKDKLMDFLEKEFDEFRIVDLTGLDKENKAFNASYGTYHDLRKILDKDFLDNSKNEKILEDIVLTLTLFEDREMIRKRLENYSDLLTKEQVKKLERRHYTGWGRLSAELIHGIRNKESRKTLLDYLIDDGNSNRNFMQLINDDALSFKEEIAKAQVIGETDNLNQVVSDIAGSPAIKKGILQSLKIVDELVKIMGHQPENIVVEMARENQFTNQGQRNSQQRLKGLTDSIKEFGSQILKEHPVENSQLQNDRLFLYYLQNGRDMYTGEELDIDYLSQYDIDHIIPQAFIKDNSIDNRVLTSSKENRGKSDDVPSKDVVRKMKSYWSKLLSAKLITQRKFDNLTKAERGGLTDDDKAGFIKRQLVETRQITKHVARILDERFNTETDENNKKIRQVKIVTLKSNLVSNFRKEFELYKVREINDYHHAHDAYLNAVIGKALLGVYPQLEPEFVYGDYPHFHGHKENKATAKKFFYSNIMNFFKKDDVRTDKNGEIIWKKDEYISNIKKVLSYPQVNIVKKVEEQTGGFSKESILPKGDSDKLIPRKTKKFYWDTKKYGGFDSPIVAYSILVIADIEKGKSKKLKTVKALVGVTIMEKMTFERDPVAFLERKGYRNVQEENIIKLPKYSLFKLENGRKRLLASARELQKGNEIVLPDHLGTLLYHAKNIHKVDEPKHLDYVDKHKDEFKELLDVVSNFSKKYTLAEGNLEKIKELYAQNNGEDLKELASSFINLLTFTAIGAPATFKFFDKNIDRKRYTSTTEILNATLIHQSITGLYETRIDLSKLGGD

SEQ ID NO: 154 - protein, 1345 aa, Streptococcus mutans
MKKPYSIGLDIGTNSVGWAVVTDDYKVPAKKMKVLGNTDKSHIKKNLLGALLFDSGNTAADRRLKRTARRRYTRRRNRILYLQEIFAEEMSKVDDSFFHRLEDSFLVTEDKRGERHPIFGNLEEEVKYHENFPTIYHLRQYLADNPEKVDLRLVYLALAHIIKFRGHFLIEGKFDTRNNDVQRLFQEFLAVYDNTFENSSLQEQNVQVEEILTDKISKSAKKDRVLKLFPNEKSNGRFAEFLKLIVGNQADFKKHFELEEKAPLQFSKDTYEEELEVLLAQIGDNYAELFLSAKKLYDSILLSGILTVTDVSTKAPLSASMIQRYNEHQMDLAQLKQFIRQKLSDKYNEVFSDVSKDGYAGYIDGKTNQEAFYKYLKGLLNKIEGSGYFLDKIEREDFLRKQRTFDNGSIPHQIHLQEMRAIIRRQAEFYPFLADNQDRIEKILTFRIPYYVGPLARGKSDFAWLSRKSADKITPWNFDEIVDKESSAEAFINRMTNYDLYLPNQKVLPKHSLLYEKFTVYNELTKVKYKTEQGKTAFFDANMKQEIFDGVFKVYRKVTKDKLMDFLEKEFDEFRIVDLTGLDKENKAFNASYGTYHDLRKILDKDFLDNSKNEKILEDIVLTLTLFEDREMIRKRLENYSDLLTKEQVKKLERRHYTGWGRLSAELIHGIRNKESRKTILDYLIDDGNSNRNFMQLINDDALSFKEEIAKAQVIGETDNLNQVVSDIAGSPAIKKGILQSLKIVDELVKIMGHQPENIVVEMARENQFTNQGRRNSQQRLKGLTDSIKEFGSQILKEHPVKHSQLQNDRLFLYYLQNGRDMYTGEELDIDYLSQYDIDHIIPQAFIKDNSIDNRVLTSSKENRGKSDDVPSKNVVRKMKSYWSKLLSAKLITQRKFDNLTKAERGGLTDDDKAGFIKRQLVETRQITKHVARILDERFHTETDENNKKIRQVKIVTLKSNLVSNFRKEFELYKVREINDYHHAHDAYLNAVIGKALLGVYPQLEPEFVYGDYPHFHGHKENKATAKKFFYSNIMNFFKKDDVRTDKNGEIIWKKDEHISNIKKVLSYPQVNIVKKVEEQTGGFSKESILPKGNSDKLIPRKTKKFYWDTKKYGGFDSPIVAYSILVIADIEKGKSKKLKTVKALVGVTIMEKMTFERDPVAFLERKGYRNVQEENIIKLPKYSLFKLENGRKRLLASARELQKGNEIVLPNHLGTLLYHAKNIHKVDEPKHLDYVDKHKDEFKELLDVVSNFSKKYTLAEGNLEKIKELYAQNNGEDLKELASSFINLLTFTAIGAPATFKFFDKNIDRKRYTSTTEILNATLIHQSITGLYETRIDLSKLGGD

SEQ ID NO: 155 - protein, 1345 aa, Streptococcus mutans
MKKPYSIGLDIGTNSVGWAVVTDDYKVPDKKMKVLGNTDKSHIKKNLLGALLFDSGNTAEDRRLKRTARRRYTRRRNRILYLQEIFSEEMGKVDDSFFHRLEDSFLVTEDKRGERHPIFGNLEEEVKYHENFPTIYHLRQYLADNPEKTDLRLVYLALAHIIKFRGHFLIEGKFDTRNNDVQRLFQEFLAVYDNTFENSSLQEQNVQVEEILTDKISKSAKKDRVLKLFPNEKSNGRFAEFLKLIVGNQADFKKHFELEEKAPLQFSKDIYEEELEVLLAQIGDNYAELFLSAKKLYDSILLSGILTVTDVSTKAPLSASMIQRYNEHQMDLAQLKQFIRQKLSDKYNEVFSDVSKDGYAGYIDGKTNQEAFYKYLKGLLNKIEGSGYFLDKIEREDFLRKQRTFDNGSIPHQIHLQEMRAIIRRQAEFYPFLADNQDRIEKILTFRIPYYVGPLARGKSDFAWLSRKSADKITPWNFDEIVDKESSVEAFINRMTNYDLYLPNQKVLPKHSLLYEKFTVYNELTKVKYKTEQGKTAFFDANMKQEIFDGVFKVYRKVTKDKLMDFLEKEFDEFRIVDLTGLDKENKAFNASYGTYHDLRKILDKDFLDNSKNEKILEDIVLTLTLFEDREMIRKRLKNYSDLLTKEQLKKLERRHYTGWGRLSAELIHGIRNKESRKTILDYLIDDGNSNRNFMQLINDDALSFKEEIAKAQVIGETDNLNQVVSDIAGSPAIKKGILQSLKIVDELVKIMGHQPENIVVEMARENQFTNQGRRNSQQRLKGLTDSIKEFGSQILKEHPVENSQLQNDRLFLYYLQNGRDMYTGEELDIDYLSQYDIDHIIPQAFIKDNSIDNRVLTSSKENRGKSDDVPSKDVVRKMKSYWSKLLSAKLITQRKFDNLTKAERGGLTDDDKAGFIKRQLVETRQITKHVARILDERFYTETDENNKKIRQVKIVTLKSNLVSNFRKEFELYKVREINDYHHAHDAYLNAVIGKALLGVYPQLEPEFVYGDYPHFHGHKENKATAKKFFYSNIMNFFKKDDVRTDKNGEIIWKKDEHISNIKKVLSYPQVNIVKKVEEQTGGFSKESILPKGNSDKLIPRKTKKFYWDTKKYGGFDSPIVAYSILVIADIEKGKSKKLKTVKALVGVTIMEKMTFERDPVAFLERKGYRNVQEENIIKLPKYSLFKLENGRKRLLASARELQKGNEIVLPNHLGTLLYHAKNIHKVDEPKHLDYVDKHKDEFKELLDVVSNFSKKYTLAEGNLEKIKELYAQNNGEDLKELASSFINLLTFTAIGAPATFKFFDKNIDRKRYTSTTEILNATLIHQSITGLYETRIDLSKLGGD

SEQ ID NO: 156 - protein, 1345 aa, Streptococcus mutans
MKKPYSIGLDIGTNSVGWAVVTDDYKVPAKKMKVLGNTDKSHIKKNLLGALLFDSGNTAADRRLKRTARRRYTRRRNRILYLQEIFAEEMSKVDDSFFHRLEDSFLVTEDKRGERHPIFGNLEEEVKYHENFPTIYHLRQYLADNPEKVDLRLVYLALAHIIKFRGHFLIEGKFDTRNNDVQRLFQEFLAVYDNTFENSSLQEQNVQVEEILTDKISKSAKKDRVLKLFPNEKSNGRFAEFLKLIVGNQADFKKHFELEEKAPLQFSKDTYEEELEVLLAQIGDNYAELFLSAKKLYDSILLSGILTVTDVSTKAPLSASMIQRYNEHQMDLAQLKQFIRQKLSDKYNEVFSDVSKDGYAGYIDGKTNQEAFYKYLKGLLNKIEGSGYFLDKIEREDFLRKQRTFDNGSIPHQIHLQEMRAIIRRQAEFYPFLADNQDRIEKILTFRIPYYVGPLARGKSDFAWLSRKSADKITPWNFDEIVDKESSAEAFINRMTNYDLYLPNQKVLPKHSLLYEKFTVYNELTKVKYKTEQGKTAFFDANMKQEIFDGVFKVYRKVTKDKLMDFLEKEFDEFRIVDLTGLDKENKAFNASYGTYHDLRKILDKDFLDNSKNEKILEDIVLTLTLFEDREMIRKRLENYSDLLTKEQVKKLERRHYTGWGRLSAELIHGIRNKESRKTILDYLIDDGNSNRNFMQLINDDALSFKEEIAKAQVIGETDNLNQVVSDIAGSPAIKKGILQSLKIVDELVKIMGHQPENIVVEMARENQFTNQGRRNSQQRLKGLTDSIKEFGSQILKEHPVENSQLQNDRLFLYYLQNGRDMYTGEELDIDYLSQYDIDHIIPQAFIKDNSIDNRVLTSSKENRGKSDDVPSKNVVRKMKSYWSKLLSAKLITQRKFDNLTKAERGGLTDDDKAGFIKRQLVETRQITKHVARILDERFHTETDENNKKIRQVKIVTLKSNLVSNFRKEFELYKVREINDYHHAHDAYLNAVIGKALLGVYPQLEPEFVYGDYPHFHGHKENKATAKKFFYSNIMNFFKKDDVRTDKNGEIIWKKDEHISNIKKVLSYPQVNIVKKVEEQTGGFSKESILPKGNSDKLIPRKTKKFYWDTKKYGGFDSPIVAYSILVIADIEKGKSKKLKTVKALVGVTIMEKMTFERDPVAFLERKGYRNVQEENIIKLPKYSLFKLENGRKRLLASARELQKGNEIVLPNHLGTLLYHAKNIHKVDEPKHLDYVDKHKDEFKELLDVVSNFSKKYTLAEGNLEKIKELYAQNNGEDLKELASSFINLLTFTAIGAPATFKFFDKNIDRKRYTSTTEILNATLIHQSITGLYETRIDLSKLGGD

SEQ ID NO: 157 - protein, 1345 aa, Streptococcus mutans
MKKPYSIGLDIGTNSVGWAVVTDDYKVPAKKMKVLGNTDKSHIEKNLLGALLFDSGNTAEDRRLKRTARRRYTRRRNRILYLQEIFSEEMGKVDDSFFHRLEDSFLVTEDKRGERHPIFGNLEEEVKYHENFPTIYHLRQYLADNPEKVDLRLVYLALAHIIKFRGHFLIEGKFDTRNNDVQRLFQEFLAVYDNTFENSSLQEQNVQVEEILTDKISKSAKKDRVLKLFPNEKSNGRFAEFLKLIIGNQADFKKHFELEEKAPLQFSKDTYEEELEVLLAQIGDNYAELFLSAKKLYDSILLSGILTVTDVGTQAPLSASMIQRYNEHQMDLAQLKQFIRQKLSDKYNEVFSDVSKDGYAGYIDGKTNQEAFYKYLKGLLNKIEGSGYFLDKIEREDFLRKQRTFDNGSIPHQIHLQEMRAIIRRQAEFYPFLADNQDRIEKLLTFRIPYYVGPLARGKSDFAWLSRKSADKITPWNFDEIVDKESSAEAFINRMTNYDLYLPNQKVLPKHSLLYEKFTVYNELTKVKYKTEQGKTAFFDANMKQEIFDGVFKVYRKVTKDKLMDFLEKEFDEFRIVDLTGLDKENKVFNASYGTYHDLCKILDKDFLDNSKNEKILEDIVLTLTLFEDREMIRKRLENYSDLLTKEQVKKLERRHYTGWGRLSAELIHGIRNKESRKTILDYLIDDGNSNRNFMQLINDDALSFKEEIAKAQVIGETDNLNQVVSDIAGSPAIKKGILQSLKIVDELVKIMGHQPENIVVEMARENQFTNQGRRNSQQRLKGLTDSIKEFGSQILKEHPVENSQLQNDRLFLYYLQNGRDMYTGEELDIDYLSQYDIDHIIPQAFIKDNSIDNRVLTSSKENRGKSDDVPSKDVVRKMKSYWSKLLSAKLITQRKFDNLTKAERGGLTDDDKAGFIKRQLVETRQITKHVARILDERFHTETDENNKKIRQVKIVTLKSNLVSNFRKEFELYKVREINDYHHAHDAYLNAVIGKALLGVYPQLEPEFVYGDYPHFHGHKENKATAKKFFYSNIMNFFKKDDVRTDKNGEIIWKKDEHISNIKKVLSYPQVNIVKKVEEQTGGFSKESILPKGNSDKLIPRKTKKFYWDTKKYGGFDSPIVAYSILVIADIEKGKSKKLKTVKALVGVTIMEKMTFERDPVAFLERKGYRNVQEENIIKLPKYSLFKLENGRKRLLASARELQKGNEIVLPNHLGTLLYHAKNIHKVDEPKHLDYVDKHKDEFKELLDVVSNFSKKYTLAEGNLEKIKELYAQNNGEDLKELASSFINLLTFTAIGAPATFKFFDKNIDRKRYTSTTEILNATLIHQSITGLYETRIDLNKLGGD

SEQ ID NO: 158 - protein, 1345 aa, Streptococcus mutans
MKKPYSIGLDIGTNSVGWAVVTDDYKVPAKKMKVLGNTDKSHIKKNLLGALLFDSGNTAEDRRLKRTARRRYTRRRNRILYLQEIFSEEMGKVDDSFFHRLEDSFLVTEDKRGERHPIFGNLEEEVKYHENFPTIYHLRQYLADNPEKVDLRLVYLALAHIIKFRGHFLIEGKFDTRNNDVQKLFQEFLAVYDNTFENSSLQEQNVQVEEILTDKISKSAKKDRVLKLFPNEKSNGRFAEFLKLIVGNQADFKKHFELEEKAPLQLSKDTYEEELEVLLAQIGDNYAELFLSAKKLYDSILLSGILTVTDVSTKAPLSASMIQRYNEHQMDLAQLKQFIRQKLSDKYNEVFSDVSKDGYAGYIDGKTNQEAFYKYLKGLLNKIEGSGYFLDKIEREDFLRKQRTFDNGSIPHQIHLQEMRAIIRRQAEFYPFLADNQDRIEKILTFRIPYYVGPLARGKSDFAWLSRKSADKITPWNFDEIVDKESSVEAFINRMTNYDLYLPNQKVLPKHSLLYEKFTVYNELTKVKYKTEQGKTAFFDANMKQEIFDGVFKVYRKVTKDKLMDFLEKEFDEFRIVDLTGLDKENKAFNASYGTYHDLRKILDKDFLDNSKNEKILEDIVLTLTLFEDREMIRKRLENYSDLLTKEQVKKLERRHYTGWGRLSAELIHGIRNKESRKTLLDYLIDDGNSNRNFMQLINDDALSFKEEIAKAQVIGETDNLNQVVSDIAGSPAIKKGILQSLKIVDELVKIMGHQPENIVVEMARENQFTNQGRRNSQQRLKGLTDSIKEFGSQILKEHPVENSQLQNDRLFLYYLQNGRDMYTGEELDIDYLSQYDIDHIIPQAFIKDNSIDNRVLTSSKENRGKSDDVPSKDVVRKMKSYWSKLLSAKLITQRKFDNLTKAERGGLTDDDKAGFIKRQLVETRQITKHVARILDERFNTETDENNKKIRQVKIVTLKSNLVSNFRKEFELYKVREINDYHHAHDAYLNAVIGKALLGVYPQLEPEFVYGDYPHFHGHKENKATAKKFFYSNIMNFFKKDDVRTDKNGEIIWKKDEYISNIKKVLSYPQVNIVKKVEEQTGGFSKESILPKGNSDKLIPRKTKKFYWDTKKYGGFDSPIVAYSILVIADIEKGKSKKLKTVKALVGVTIMEKMTFERDPIAFLERKGYRNVQEENIIKLPKYSLFKLENGRKRLLASARELQKGNEIVLPNHLGTLLYHAKNIHKVDEPKHLDYVDKHKDEFKELLDVVSNFSKKYTLAEGNLEKIKELYAQNNGEDLKELASSFINLLTFTAIGAPAAFKFFDKNIDRKRYTSTTEILNATLIHQSITGLYETRIDLSKLGGD

SEQ ID NO: 159 - protein, 1345 aa, Streptococcus mutans
MKKPYSIGLDIGTNSVGWAVVTDDYKVPAKKMKVLGNTDKSHIKKNLLGALLFDSGNTAEDRRLKRTARRRYTRRRNRILYLQEIFSEEMGKVDDSFFHRLEDSFLVTEDKRGECHPIFGNLEEEVKYHENFPTIYHLRQYLADNPEKTDLRLVYLALAHIIKFRGHFLIEGKFDTRNNDVQRLFQEFLAVYDNTFENSSLQEQNVQVEEILTDKISKSAKKDRVLKLFPNEKSNGRFAEFLKLIVGNQADFKKHFELEEKAPLQFSKDTYEEELEVLLAQIGDNYAELFLSAKKLYDSILLSGILTVTDVSTKAPLSASMIQRYNEHQMDLTQLKQFIRQKLSDKYNEVFSDVSKDGYAGYIDGKTNQEAFYKYLKGLLNKIEGNGYFLDKIEREDFLRKQRTFDNGSIPHQIHLQEMRAIIRRQAEFYPFLADNQDRIEKILTFRIPYYVGPLARGKSDFAWLSRKSADKITPWNFDEIVDKESSAEAFINRMTNYDLYLPNQKVLPKHSLLYEKFTVYNELTKVKYKTEQGKTAFFDANMKQEIFDGVFKVYRKVTKDKLMDFLEKEFDEFRIVDLTGLDKENKAFNASYGTYHDLRKILDKDFLDNSKNEKILEDIVLTLTLFEDREMIRKRLENYSDLLTKEQVKKLERRHYTGWGRLSAELIHGIRNKESRKTLLDYLIDDGNSNRNFMQLINDDALSFKEEIAKAQVIGETDNLNQVVSDIAGSPAIKKGILQSLKIVDELVKIMGHQPENIVVEMARENQFTNQGRRNSQQRLKGLTDSIKEFGSQILKEHPVENSQLQNDRLFLYYLQNGRDMYTGEELDIDYLSQYDIDHIIPQAFIKDNSIDNRVLTSSKENRGKSDDVPSKDVVRKMKPYWSKLLSAKLITQRKFDNLTKAERGGLTDDDKAGFIKRQLVETRQITKHVARILDERFNTETDENNKKIRQVKIVTLKSNLVSNFRKEFELYKVREINDYHHAHDAYLNAVIGKALLGVYPQLEPEFVYGDYPHFHGHEENKATAKKFFYSNIMNFFKKDDVRTDKNGEIIWKKDEHISNIKKVLSYPQVNIVKKVEEQTGGFSKESILPKGNSDKLIPRKTKKFYWDTKKYGGFDSPIVAYSILVIADIEKGKSKKLKTVKALVGVTIMEKMTFERDPVAFLERKGYRNVQEENIIKLPKYSLFKLENGRKRLLASARELQKGNEIVLPNHLGTLLYHAKNIHKVDEPKHLDYVDKHKDEFKELLDVVSNFSKKYTLAEGNLEKIKELYAQNNGEDLKELSSSFINLLTFTAIGAPAAFKFFDKNIDRKRYTSTTEILNATLIHQSITGLYETRIDLSKLGGD

SEQ ID NO: 160 - protein, 1345 aa, Streptococcus mutans
MKKPYSIGLDIGTNSVGWAVVTDDYKVPAKKMKVLGNTDKSHIEKNLLGALLFDSGNTAEDRRLKRTARRRYTRRRNRILYLQEIFSEEMGKVDDSFFHRLEDSFLVTEDKRGERHPIFGNLEEEVKYHENFPTIYHLRQYLADNPEKVDLRLVYLALAHIIKFRGHFLIEGKFDTRNNDVQRLFQEFLAVYDNTFENSSLQEQNVQVEEILTDKISKSAKKDRVLKLFPNEKSNGRFAEFLKLIVGNQADFKKHFELEEKVPLQFSKDTYEEELEVLLAQIGDNYAELFLSAKKLYDSILLSGILTVTDVGTKAPLSASMIQRYNEHQMDLAQLKQFIRQKLSDKYNEVFSDVSKDGYAGYIDGKTNQEAFYKYLKGLLNKIEGSGYFLDKIEREDFLRKQRTFDNGSIPHQIHLQEMRAIIRRQAEFYPFLADNQDRIEKLLTFRIPYYVGPLARGKSDFAWLSRKSADKITPWNFDEIVDKESSAEAFINRMTNYDLYLPNQKVLPKHSLLYEKFTVYNELTKVKYKTEQGKTAFFDANMKQEIFDGVFKVYRKVTKDKLMDFLEKEFDEFRIVDLTGLDKENKVFNASYGTYHDLCKILDKDFLDNSKNEKILEDIVLTLTLFEDREMIRKRLENYSDLLTKEQVKKLERRHYTGWGRLSAELIHGIRNKESRKTILDYLIDDGNSNRNFMQLINDDALSFKEEIAKAQVIGETDNLNQVVSDIAGSPAIKKGILQSLKIVDELVKIMGHQPENIVVEMARENQFTNQGRRNSQQRLKGLTDSIKEFGSQILKEHPVENSQLQNDRLFLYYLQNGRDMYTGEELDIDYLSQYDIDHIIPQAFIKDNSIDNRVLTSSKENRGKSDDVPSKDVVRKMKSYWSKLLSAKLITQRKFDNLTKAERGGLTDDDKAGFIKRQLVETRQITKHVARILDERFNTETDENNKKIRQVKIVTLKSNLVSNFRKEFELYKVREINDYHHAHDAYLNAVIGKALLGVYPQLEPEFVYGDYPHFHGHKENKATAKKFFYSNIMNFFKKDDVRTDKNGEIIWKKDEHISNIKKVLSYPQVNIVKKVEEQTGGFSKESILPKGNSDKLIPRKTKKFYWDTKKYGGFDSPIVAYSILVIADIEKGKSKKLKTVKALVGVTIMEKMTFERDPVAFLERKGYRNVQEENIIKLPKYSLFKLENGRKRLLASARELQKGNEIVLPNHLGTLLYHAKNIHKVDEPKHLDYVDKHKDEFKELLDVVSNFSKKYTLAEGNLEKIKELYAQNNGEDLKELASSFINLLTFTAIGAPATFKFFDKNIDRKRYTSTTEILNATLIHQSITGLYETRIDLNKLGGD

SEQ ID NO: 161 - protein, 1345 aa, Streptococcus mutans
MKKPYSIGLDIGTNSVGWAVVTDDYKVPAKKMKVLGNTDKSHIKKNLLGALLFDSGNTAEDRRLKRTARRRYTRRRNRILYLQEIFSEEMGKVDDSFFHRLEDSFLVTEDKRGERHPIFGNLEEEVKYHENFPTIYHLRQYLADNPEKTDLRLVYLALAHIIKFRGHFLIEGKFDTRNNDVQRLFQEFLAVYDNTFENSSLQEQNVQVEEILTDKISKSAKKDRVLKLFPNEKSNGRFAEFLKLIVGNQADFKKHFELEEKAPLQFSKDIYEEELEVLLAQIGDNYAELFLSAKKLYDSILLSGILTVTDVSTKAPLSASMIQRYNEHQMDLAQLKQFIRQKLSDKYNEVFSDVSKDGYAGYIDGKTNQEAFYKYLKGLLNKIEGSGYFLDKIEREDFLRKQRTFDNGSIPHQIHLQEMRAIIRRQAEFYPFLADNQDRIEKILTFRIPYYVGPLARGKSDFAWLSRKSADKITPWNFDEIVDKESSAEAFINRMTNYDLYLPNQKVLPKHSLLYEKFTVYNELTKVKYKTEQGKTAFFDANMKQEIFDGVFKVYRKVTKDKLMDFLEKEFDEFRIVDLTGLDKENKAFNASYGTYHDLRKILDKDFLDNSKNEKILEDIVLTLTLFEDREMIRKRLKNYSDLLTKEQLKKLERRHYTGWGRLSAELIHGIRNKESRKTILDYLIDDGNSNRNFMQLINDDALSFKEEIAKAQVIGETDNLNQVVSDIAGSLAIKKGILQNLKIVDELVKIMGHQPENIVVEMARENQFTNQGRRNSQQRLKGLTDSIKEFGSQILKEHPVENSQLQNDRLFLYYLQNGRDMYTGEELDIDYLSQYDIDHIIPQAFIKDNSIDNRVLTSSKENRGKSDDVPSKDVVRKMKSYWSKLLSAKLITQRKFDNLTKGERGGLTDDDKAGFIKRQLVETRQITKHVARILDERFNTETDENNKKIRQVKIVTLKSNLVSNFRKEFELYKVREINDYHHAHDAYLNAVIGKALLGVYPQLEPEFVYGDYPHFHGHKENKATAKKFFYSNIMNFFKKDDVRTDKNGEIIWKKDEYISNIKKVLSYPQVNIVKKVEEQTGGFFKESILPKGDSDKLIPRKTKKFYWDTKKYGGFDSPIVAYSILVIADIEKGKSKKLKTVKALVGVTIMEKMTFERDPVAFLERKGYRNVQEENIIKLPKYSLFKLENGRKRLLASARELQKGNEIVLPNHLGTLLYHAKNIHKVDEPKHLDYVDKHKDEFKELLDVVSNFSKKYTLAEGNLEKIKELYAQNNGEDLKELASSFINLLTFTAIGAPATFKFFDKNIDRKRYTSTTEILNATLIHQSITGLYETRIDLSKLGGD

SEQ ID NO: 162 - protein, 1345 aa, Streptococcus mutans
MKKPYSIGLDIGTNSVGWAVVTDDYKVPAKKMKVLGNTDKSHIEKNLLGALLFDSGNTAEDRRLKRTARRRYTRRRNRILYLQEIFSEEMGKVDDSFFHRLEDSFLVTEDKRGERHPIFGNLEEEVKYHENFPTIYHLRQYLADNPEKVDLRLVYLALAHIIKFRGHFLIEGKFDTRNNDVQRLFQEFLAVYDNTFENSSLQEQNVQVEEILTDKISKSAKKDRVLKLFPNEKSNGRFAEFLKLIVGNQADFKKHFELEEKAPLQFSKDTYEEELEVLLAQIGDNYAELFLSAKKLYDSILLSGILTVTDVGTKAPLSASMIQRYNEHQMDLAQLKQFIRQKLSDKYNEVFSDVSKDGYAGYIDGKTNQEAFYKYLKGLLNKIEGSGYFLDKIEREDFLRKQRTFDNGSIPHQIHLQEMRAIIRRQAEFYPFLADNQDRIEKLLTFRIPYYVGPLARGKSDFAWLSRKSADKITPWNFDEIVDKESSAEAFINRMTNYDLYLPNQKVLPKHSLLYEKFTVYNELTKVKYKTEQGKTAFFDANMKQEIFDGVFKVYRKVTKDKLMDFLEKEFDEFRIVDLTGLDKENKVFNASYGTYHDLCKILDKDFLDNSKNEKILEDIVLTLTLFEDREMIRKRLENYSDLLTKEQVKKLERRHYTGWGRLSAELIHGIRNKESRKTILDYLIDDGNSNRNFMQLINDDALSFKEEIAKAQVIGETDNLNQVVSDIAGSPAIKKGILQSLKIVDELVKIMGHQPENIVVEMARENQFTNQGRRNSQQRLKGLTDSIKEFGSQILKEHPVENSQLQNDRLFLYYLQNGRDMYTGEELDIDYLSQYDIDHIIPQAFIKDNSIDNRVLTSSKENRGKSDDVPSKDVVRKMKSYWSKLLSAKLITQRKFDNLTKAERGGLTDDDKAGFIKRQLVETRQITKHVARILDERFNTETDENNKKIRQVKIVTLKSNLVSNFRKEFELYKVREINDYHHAHDAYLNAVIGKALLGVYPQLEPEFVYGDYPHFHGHKENKATAKKFFYSNIMNFFKKDDVRTDKNGEIIWKKDEHISNIKKVLSYPQVNIVKKVEEQTGGFSKESILPKGNSDKLIPRKTKKFYWDTKKYGGFDSPIVAYSILVIADIEKSKSKKLKTVKALVGVTIMEKMTFERDPVAFLERKGYRNVQEENIIKLPKYSLFKLENGRKRLLASARELQKGNEIVLPNHLGTLLYHAKNIHKVDEPKHLDYVDKHKDEFKELLDVVSNFSKKYTLAEGNLEKIKELYAQNNGEDLKELASSFINLLTFTAIGAPATFKFFDKNIDRKRYTSTTEILNATLIHQSITGLYETRIDLNKLGGD

SEQ ID NO: 163 - protein, 1336 aa, Streptococcus mutans
MKKPYSIGLDIGTNSVGWAVVTDDYKVPAKKMKVLGNTDKSHIKKNLLGALLFDSGNTAEDRRLKRTARRRYTRRRNRILYLQEIFAEEMSKVDDSFFHRLDESFLTDDDKNFDSHPIFGNKAEEDAYHQKFPTIYHLRKHLADSTEKADLRLVYLALAHMIKFRGHFLIEGELNAENTDVQKLFADFVGVYDRTFDDSHLSEITVDASSILTEKISKSRRLEKLINNYPKEKKNTLFGNLIALSLGLQPNFKTNFKLSEDAKLQFSKDTYEEDLEELLGKIGDDYADLFTLAKNLYDAILLSGILTADDSSTKAPLSASMIKRYAEHHEDLEKLKEFIKANKPELYHDIFKDETKNGYAGYIENGVKQDEFYKYLKNTLSKITGSDYFLDQIEREDFLRKQRTFDNGSIPHQIHLQEMHAILRRQGDYYPFLKENQDRIEKILTFRIPYYVGPLARKNSRFAWAEYHSDEAVTPWNFDQVIDKESSAQAFIEHMTNNDLYLPNEKVLPKHSPLYEKYTVYNELTKIKYVTEIGEAKFFDANLKQEIFDGLFKHERKVTKKKLRTFLDKNFDEFRIVDIQGLDKETETFNASYATYQDLLKVIKDKVFMDNPENAEILENIVLTLTLFEDREMIKQRLAKYADVFDKKVIDQLARRHYTGWGRLSAKLLNGIRDKQSCKTIMDYLIDDAQSNRNLMQLITDDNLTFKDDIVKAQYVDNSDDLHQVVQSLAGSPAIKKGILQSLKIVDELVKVMGKEPEQIVVEMARENQTTAKGRRNSQQRYKRLKEAIKDLNHKILKEHPTDNQALQNNRLFLYYLQNGRDMYTGESLDINRLSDYDIDHVIPQAFIKDNSIDNRVLTSSKANRGKSDDVPSEDVVNRMRPFWNKLLSSGLISQRKYNNLTKKELTLDDKAGFIKRQLVETRQITKHVARMLDERFNKEFDDNNKRIRRVKIVTLKSNLVSSFRKEFELYKVREINDYHHAHDAYLNAVVVKALLVKYPKLEPEFVYGEYLKYNSYRERKATQKMFFYSNIMNMFKSKVKLADDQIVERPMIEVNDETGEIAWDKTKHITTVKKVLSYPQVNIVKKVEEQTGGLFDPKSPLEKLVPLKKALNPEKYGGYQKPTTAYPILLIVDTKQLIPISVMDKKRFEQNPVKFLKDKGYQQIEKNNFVKLPKYTLVDIGNGIKRLWASSKEVHKGNQLVVSKKSQDLLYHAHHLDNDYSNEYVKNHYQQFDILFNEITSFSKKCKLGKEHIQKIEEAYSKERDFASIEELADGFIKLLGFTQLGATSPFSFLGIKLNQKQYTGKKDYLEATLIHQSITGLYETRIDLSKLGGD

SEQ ID NO: 164 - protein, 1345 aa, Streptococcus mutans
MKKPYSIGLDIGTNSVGWAVVTDDYKVPAKKMKVLGNTDKSHIKKNLLGALLFDSGNTAADRRLKRTARRRYTRRRNRILYLQEIFAEEMSKVDDSFFHRLEDSFLVTEDKRGERHPIFGNLEEEVKYHENFPTIYHLRQYLADNPEKVDLRLVYLALAHIIKFRGHFLIEGKFDTRNNDVQRLFQEFLAVYDNTFENSSLQEQNVQVEEILTDKISKSAKKDRVLKLFPNEKSNGRFAEFLKLIVGNQADFKKHFELEEKAPLQFSKDTYEEELEVLLAQIGDNYAELFLSAKKLYDSILLSGILTVTDVSTKAPLSASMIQRYNEHQMDLVQLKQFIRQKLSDKYNEVFSDVSKDGYAGYIDGKTNQEAFYKYLKGLLNKIEGSGYFLDKIEREDFLRKQRTFDNGSIPHQIHLQEMRAIIRRQAEFYPFLADNQDRIEKILTFRIPYYVGPLARGKSDFAWLSRKSADKITPWNFDEIVDKESSAEAFINRMTNYDLYLPNQKVLPKHSLLYEKFTVYNELTKVKYKTEQGKTAFFDANMKQEIFDGVFKVYRKVTKDKLMDFLEKEFDEFRIVDLTGLDKENKAFNASYGTYHDLRKILDKDFLDNSKNEKILEDIVLTLTLFEDREMIRKRLENYSDLLTKEQVKKLERRHYTGWGRLSAELIHGIRNKESRKTILDYLIDDGNSNRNFMQLINDDALSFKEEIAKAQVIGETDNLNQVVSDIAGSPAIKKGILQSLKIVDELVKIMGHQPENIVVEMARENQFTNQGRRNSQQRLKGLTDSIKEFGSQILKEHPVEHSQLQNDRLFLYYLQNGRDMYTGEELDIDYLSQYDIDHIIPQAFIKDNSIDNRVLTSSKENRGKSDDVPSKNVVRKMKSYWSKLLSAKLITQRKFDNLTKAERGGLTDDDKAGFIKRQLVETRQITKHVARILDERFHTETDENNKKIRQVKIVTLKSNLVSNFRKEFELYKVREINDYHHAHDAYLNAVIGKALLGVYPQLEPEFVYGDYPHFHGHKENKATAKKFFYSNIMNFFKKDDVRTDKNGEIIWKKDEHISNIKKVLSYPQVNIVKKVEEQTGGFSKESILPKGNSDKLIPRKTKKFYWDTKKYGGFDSPIVAYSILVIADIEKGKSKKLKTVKALVGVTIMEKMTFERDPVAFLERKGYRNVQEENIIKLPKYSLFKLENGRKRLLASARELQKGNEIVLPNHLGTLLYHAKNIHKVDEPKHLDYVDKHKDEFKELLDVVSNFSKKYTLAEGNLEKIKELYAQNNGEDLKELASSFINLLTFTAIGAPATFKFFDKNIDRKRYTSTTEILNATLIHQSITGLYETRIDLSKLGGD

SEQ ID NO: 165 - protein, 1345 aa, Streptococcus mutans
MKKPYSIGLDIGTNSVGWAVVTDDYKVPAKKMKVLGNTDKSHIKKNLLGALLFDSGNTAEDRRLKRTTRRRYTRRRNRILYLQEIFSEEMGKVDDSFFHRLEDSFLVTEDKRGERHPIFGNLEEEVKYHENFPTIYHLRQYLADNPEKTDLRLVYLALAHIIKFRGHFLIEGKFDTRNNDVQRLFQEFLAVYDNTFENSSLQEQNVQVEEILTDKISKSAKKDRVLKLFPNEKSNGRFAEFLKLIVGNQADFKKHFELEEKAPLQFSKDTYEEELEVLLAQIGDNYAELFLSAKKLYDSILLSGILTVTDVSTKAPLSASMIQRYNEHQMDLTQLKQFIRQKLSDKYNEVFSDVSKDGYAGYIDGKTNQEAFYKYLKGLLNKIEGSGYFLDKIEREDFLRKQRTFDNGSIPHQIHLQEMRAIIRRQAEFYPFLADNQDRIEKLLTFRIPYYVGPLASGKSDFAWLSRKSADKITPWNFDEIVDKESSAEAFINRMTNYDLYLPNQKVLPKHSLLYEKFTVYNELTKVKYKTEQGKTAFFDANMKQEIFDGVFKVYRKVTKDKLMDFLEKEFDEFRIVDLTGLDKENKVFNASYGTYHDLCKILDKDFLDNSKNEKILEDIVLTLTLFEDREMIRKRLENYSDLLTKEQVKKLERRHYTGWGRLSAELIHGIRNKESRKTILDYLIDDGNSNRNFMQLINDDALSFKEEIAKAQVIGETDNLNQVVSDIAGSPAIKKGILQSLKIVDELVKIMGHQPENIVVEMARENQFTNQGRRNSQQRLKGLTDSIKEFGSQILKEHPVENSQLQNDRLFLYYLQNGRDMYTGEELDIDYLSQYDIDHIIPQAFIKDNSIDNRVLTSSKENRGKSDDVPSKDVVRKMKSYWSKLLSAKLITQRKFDNLTKAERGGLTDDDKAGFIKRQLVETRQITKHVARILDERFNTETDENNKKIRQVKIVTLKSNLVSNFRKEFELYKVREINDYHHAHDAYLNAVIGKALLGVYPQLEPEFVYGDYPHFHGHKENKATAKKFFYSNIMNFFKKDDVRTDKNGEIIWKKDEHISNIKKVLSYPQVNIVKKVEEQTGGFSKESILPKGNSDKLIPRKTKKFYWDTKKYGGFDSPIVAYSILVIADIEKGKSKKLKTVKALVGVTIMEKMTFERDPVAFLERKGYRNVQEENIIKLPKYSLFKLENGRKRLLASARELQKGNEIVLPNHLGTLLYHAKNIHKVDEPKHLDYVDKHKDEFKELLDVVSNFSKKYTLAEGNLEKIKELYAQNNGEDLKELASSFINLLTFTAIGAPATFKFFDKNIDRKRYTSTTEILNATLIHQSITGLYETRIDLSKLGGD

SEQ ID NO: 166 - protein, 1336 aa, Streptococcus mutans
MKKPYSIGLDIGTNSVGWAVVTDDYKVPAKKMKVLGNTDKSHIKKNLLGALLFDSGNTAADRRLKRTARRRYTRRRNRILYLQEIFAEEMNKVDDSFFHRLDESFLTDDDKNFDSHPIFGNKAEEDAYHQKFPTIYHLRKHLADSTEKADLRLVYLALAHMIKFRGHFLIEGELNAENTDVQKLFADFVGVYDRTFDDSHLSEITVDASSILTEKISKSRRLEKLINNYPKEKKNTLFGNLIALSLGLQPNFKTNFKLSEDAKLQFSKDTYEEDLEELLGKIGDDYADLFTLAKNLYDAILLSGILTADDSSTKAPLSASMIKRYAEHHEDLEKLKEFIKANKPELYHDIFKDETKNGYAGYIENGVKQDEFYKYLKNTLSKIAGSDYFLDKIEREDFLRKQRTFDNGSIPHQIHLQEMHAILRRQGDYYPFLKENQDRIEKILTFRIPYYVGPLARKNSRFAWAEYHSDEAVTPWNFDQVIDKESSAQAFIEHMTNNDLYLPNEKVLPKHSPLYEKYTVYNELTKIKYVTEIGEAKFFDANLKQEIFDGLFKHERKVTKKKLRTFLDKNFDEFRIVDIQGLDKETETFNASYATYQDLLKVIKDKVFMDNPENAEILENIVLTLTLFEDREMIKQRLAKYADVFDKKVIDQLARRHYTGWGRLSAKLLNGIRDKQSCKTIMDYLIDDAQSNRNLMQLITDDNLTFKDDIVKAQYVDNSDDLHQVVQSLAGSPAIKKGILQSLKIVDELVKVMGKEPEQIVVEMARENQTTAKGRRNSQQRYKRLKEAIKDLNHKILKEHPTDNQALQNNRLFLYYLQNGRDMYTGESLDINRLSDYDIDHVIPQAFIKDNSIDNRVLTSSKANRGKSDDVPSEDVVNRMRPFWNKLLSSGLISQRKYNNLTKKELTLDDKAGFIKRQLVETRQITKHVARMLDERFNKEFDDNNKRIRRVKIVTLKSNLVSSFRKEFELYKVREINDYHHAHDAYLNAVVVKALLVKYPKLEPEFVYGEYPKYNSYRERKATQKMFFYSNIMNMFKSKVKLADDQIVERPMIEVNDETGEIAWDKTKHITTVKKVLSYPQVNIVKKVEEQTGGLFDPKSPLEKLVPLKKALNPEKYGGYQKPTTAYPILLIVDTKQLIPISVMDKKRFEQNPVKFLKDKGYQQIEKNNFVKLPKYTLVDIGNGIKRLWASSKEVHKGNQLVVSKKSQDLLYHAHHLDNDYSNEYVKNHYQQFDILFNEITSFSKKCKLGKEHIQKIEEAYSKERDSASIEELADGFIKLLGFTQLGATSPFSFLGIKLNQKQYTGKKDYLEATLIHQSITGLYETRIDLSKLGGD

SEQ ID NO: 167 - protein, 1345 aa, Streptococcus mutans
MKKPYSIGLDIGTNSVGWAVVTDDYKVPAKKMKVLGNTDKSHIKKNLLGALLFDSGNTAADRRLKRTARRRYTRRRNRILYLQEIFAEEMSKVDDSFFHRLEDSFLVTEDKRGERHPIFGNLEEEVKYYENFPTIYHLRQYLADNPEKVDLRLVYLALAHIIKFRGHFLIEGKFDTRNNDVQRLFQEFLAVYDNTFENSSLQEQNVQVEEILTDKISKSAKKDRVLKLFPNEKSNGRFAEFLKLIVGNQADFKKHFELEEKAPLQFSKDTYEEDLEELLGKIGDDYADLFTLAKNLYDAILLSGILTADDSSTKAPLSASMIQRYNEHQMDLAQLKQFIRQKLSDKYNEVFSDVSKDGYAGYIDGKTNQEAFYKYLKGLLNKIEGSGYFLDKIEREDFLRKQRTFDNGSIPHQIHLQEMRAIIRRQAEFYPFLADNQDRIEKILTFRIPYYVGPLARGKSDFAWLSRKSADKITPWNFDEIVDKESSAEAFINRMTNYDLYLPNQKVLPKHSLLYEKFTVYNELTKVKYKTEQGKTAFFDANMKQEIFDGVFKVYRKVTKDKLMDFLEKEFDEFRIVDLTGLDKENKVFNASYGTYHDLCKILDKDFLDNSKNEKILEDIVLTLTLFEDREMIRKRLENYSDLLTKEQVKKLERRHYTGWGRLSAELIHGIRNKESRKTILDYLIDDGNSNRNFMQLINDDALSFKEEIAKAQVIGETDNLNQVVSDIAGSPAIKKGILQSLKIVDELVKIMGHQPENIVVEMARENQFTNQGRRNSQQRLKGLTDSIKEFGSQILKEHPVENSQLQNDRLFLYYLQNGRDMYTGEELDIDYLSQYDIDHIIPQAFIKDNSIDNRVLTSSKENRGKSDDVPSKDVVRKMKPYWSKLLSAKLITQRKFDNLTKAERGGLTDDDKAGFIKRQLVETRQITKHVARILDERFNTETDENNKKIRQVKIVTLKSNLVSNFRKEFELYKVREINDYHHAHDAYLNAVIGKALLGVYPQLEPEFVYGDYPHFHGHEENKATAKKFFYSNIMNFFKKDDVRTDKNGEIIWKKDEHISNIKKVLSYPQVNIVKKVEEQTGGFSKESILPKGNSDKLIPRKTKKFYWDTKKYGGFDSPIVAYSILVIADIEKGKSKKLKTVKALVGVTIMEKMTFERDPVAFLERKGYRNVQEENIIKLPKYSLFKLENGRKRLLASARELQKGNEIVLPNHLGTLLYHAKNIHKVDEPKHLDYVDKHKDEFKELLDVVSNFSKKYTLAEGNLEKIKELYAQNNGEDLKELASSFINLLTFTAIGAPATFKFFDKNIDRKRYTSTTEILNATLIHQSITGLYETRIDLSKLGGD

SEQ ID NO: 168 - protein, 1345 aa, Streptococcus mutans
MKKPYSIGLDIGTNSVGWAVVTDDYKVPAKKMKVLGNTDKSHIKKNLLGALLFDSGNTAEDRRLKRTTRRRYTRRRNRILYLQEIFSEEMGKVDDSFFHRLEDSFLVTEDKRGERHPIFGNLEEEVKYHENFPTIYHLRQYLADNPEKTDLRLVYLALAHIIKFRGHFLIEGKFDTRNNDVQRLFQEFLAVYDNTFENSSLQEQNVQVEEILTDKISKSAKKDRVLKLFPNEKSNGRFAEFLKLIVGNQADFKKHFELEEKAPLQFSKDTYEEELEVLLAQIGDNYAELFLSAKKLYDSILLSGILTVTDVSTKAPLSASMIQRYNEHQMDLTQLKQFIRQKLSDKYNEVFSDVSKDGYAGYIDGKTNQEAFYKYLKGLLNKIEGSGYFLDKIEREDFLRKQRTFDNGSIPHQIHLQEMRAIIRRQAEFYPFLADNQDRIEKLLTFRIPYYVGPLASGKSDFAWLSRKSADKITPWNFDEIVDKESSAEAFINRMTNYDLYLPNQKVLPKHSLLYEKFTVYNELTKVKYKTEQGKTAFFDANMKQEIFDGVFKVYRKVTKDKLMDFLEKEFDEFRIVDLTGLDKENKVFNASYGTYHDLCKILDKDFLDNSKNEKILEDIVLTLTLFEDREMIRKRLENYSDLLTKEQVKKLERRHYTGWGRLSAELIHGIRNKESRKTILDYLIDDGNSNRNFMQLINDDALSFKEEIAKAQVIGETDNLNQVVSDIAGSPAIKKGILQSLKIVDELVKIMGHQPENIVVEMARENQFTNQGRRNSQQRLKGLTDSIKEFGSQILKEHPVENSQLQNDRLFLYYLQNGRDMYTGEELDIDYLSQYDIDHIIPQAFIKDNSIDNRVLTSSKENRGKSDDVPSKDVVRKMKSYWSKLLSAKLITQRKFDNLTKAERGGLTDDDKAGFIKRQLVETRQITKHVARILDERFNTETDENNKKIRQVKIVTLKSNLVSNFRKEFELYKVREINDYHHAHDAYLNAVIGKALLGVYPQLEPEFVYGDYPHFHGHKENKATAKKFFYSNIMNFFKKDDVRTDKNGEIIWKKDEHISNIKKVLSYPQVNIVKKVEEQTGGFSKESILPKGNSDKLIPRKTKKFYWDTKKYGGFDSPIVAYSILVIADIEKGKSKKLKTVKALVGVTIMEKMTFERDPVAFLERKGYRNVQEENIIKLPKYSLFKLENGRKRLLASARELQKGNEIVLPNHLGTLLYHAKNIHKVDEPKHLDYVDKHKDEFKELLDVVSNFSKKYTLAEGNLEKIKELYAQNNGEDLKELASSFINLLTFTAIGAPATFKFFDKNIDRKRYTSTTEILKATLIHQSITGLYETRIDLSKLGGD

SEQ ID NO: 169 - protein, 1338 aa, Streptococcus mutans
MDLIGTNSVGWAVVTDDYKVPAKKMKVLGNTDKSHIKKNLLGALLFDSGNTAADRRLKRTARRRYTRRRNRILYLQEIFAEEMSKVDDSFFHRLEDSFLVTEDKRGERHPIFGNLEEEVKYHENFPTIYHLRQYLADNPEKVDLRLVYLALAHIIKFRGHFLIEGKFDTRNNDVQRLFQEFLAVYDNTFENSSLQEQNVQVEEILTDKISKSAKKDRVLKLFPNEKSNGRFAEFLKLIVGNQADFKKHFELEEKAPLQFSKDTYEEELEVLLAQIGDNYAELFLSAKKLYDSILLSGILTVTDVSTKAPLSASMIQRYNEHQMDLAQLKQFIRQKLSDKYNEVFSDVSKDGYAGYIDGKTNQEAFYKYLKGLLNKIEGSGYFLDKIEREDFLRKQRTFDNGSIPHQIHLQEMRAIIRRQAEFYPFLADNQDRIEKILTFRIPYYVGPLARGKSDFAWLSRKSADKITPWNFDEIVDKESSAEAFINRMTNYDLYLPNQKVLPKHSLLYEKFTVYNELTKVKYKTEQGKTAFFDANMKQEIFDGVFKVYRKVTKDKLMDFLEKEFDEFRIVDLTGLDKENKAFNASYGTYHDLRKILDKDFLDNSKNEKILEDIVLTLTLFEDREMIRKRLENYSDLLTKEQVKKLERRHYTGWGRLSAELIHGIRNKESRKTILDYLIDDGNSNRNFMQLINDDALSFKEEIAKAQVIGETDNLNQVVSDIAGSPAIKKGILQSLKIVDELVKIMGHQPENIVVEMARENQFTNQGRRNSQQRLKGLTDSIKEFGSQILKEHPVEHSQLQNDRLFLYYLQNGRDMYTGEELDIDYLSQYDIDHIIPQAFIKDNSIDNRVLTSSKENRGKSDDVPSKNVVRKMKSYWSKLLSAKLITQRKFDNLTKAERGGLTDDDKAGFIKRQLVETRQITKHVARILDERFHTETDENNKKIRQVKIVTLKSNLVSNFRKEFELYKVREINDYHHAHDAYLNAVIGKALLGVYPQLEPEFVYGDYPHFHGHKENKATAKKFFYSNIMNFFKKDDVRTDKNGEIIWKKDEHISNIKKVLSYPQVNIVKKVEEQTGGFSKESILPKGNSDKLIPRKTKKFYWDTKKYGGFDSPIVAYSILVIADIEKGKSKKLKTVKALVGVTIMEKMTFERDPVAFLERKGYRNVQEENIIKLPKYSLFKLENGRKRLLASARELQKGNEIVLPNHLGTLLYHAKNIHKVDEPKHLDYVDKHKDEFKELLDVVSNFSKKYTLAEGNLEKIKELYAQNNGEDLKELASSFINLLTFTAIGAPATFKFFDKNIDRKRYTSTTEILNATLIHQSITGLYETRIDLSKLGGD

SEQ ID NO: 170 - protein, 1362 aa, Streptococcus oralis
ENKNYSIGLDIGTNSVGWAVITDDYKVPSKKMKVLGNTDKRFIKKNLIGALLFDEGTTAEARRLKRTARRRYTRRKNRLRYLQEIFAEEMSKVDSSFFHRLDDSFLIPEDKKGSKYPIFATLIEEKEYHKQFPTIYHLRKQLADSKEKTDLRLIYLALAHMIKYRGHFLYEDTFDIKNNDIQKIFNEFISIYNNTFEGNSLSGQNVQVEAIFTDKISKSAKRERVLKLFPDEKSTGLFSEFLKLIVGNQADFKKHFDLEEKAPLQFSRDTYDEDLENLLGQIGDDFADLFVAAKKLYDAILLSGILTVTDPSTKAPLSASMIERYENHQKDLATLKQFIKTNLPEKYDEVFSDQSKDGYAGYIDGKTTQESFYKYIKNLLSKFEGADYFLEKIEREDFLRKQRTFDNGSIPHQIHLQEMNAILRRQGEHYPFLKENKEKIEKILTFRIPYYVGPLARGNRDFAWLTRNSDQAIRPWNFEEIVDKASSAESFINKMTNYDLYLPEEKVLPKHSLLYETFAVYNELTKVKFIAEGLRDYQFLDSRQKKDIFYTLFKAEDKRKVTEKDIIQYLHTVDGYDGIELKGIEKQFNASLSTYHDLLKIIKDKEFMDDPNNEEILENIVHTLTIFEDREMIKQRLAQYDSLFDEKVIKALTRRHYTGWGKLSSKLINGIRDKQTGKTILDYLMDDGYNNRNFMQLINDDELSFKEIIKKAQVVGKTDDVKQVVQELPGSPAIKKGILQSIKLVDELVKVMGHEPESIVIEMARENQTTARGKKNSQQRYKRIEDSLKILASKILKEHPTDNIQLQNDRLFLYYLQNGRDMYTGKPLDINQLSSYDIDHIVPQAFIKDDSLDNRVLTSLKDNRGKSDNVPSLEVVEKMKTFWQQLLDSKLISYRKFNNLTKAERGGLDERDKVGFIKRQLVETRQITKHVAQILDARYNTEVNEKDKKNRTVKIITLKSNLVSNFRKEFRLYKIREINDYHHAHDAYLNAVVAKAILKKYPKLEPEFVYGDYQKYDLSKDPKEIEKATEKYFFYSNLLNFFKEEVHYADGTIVKRENIEYSKDTGEIAWNKEKDFATIKKVLSLPQVNIVKKREVQTGGFSKESILPKGNSDKLIPRKTKDILWDTTKYGGFDSPVIAYSILLIADIEKGKAKRLKTVKTLVGITIMEKATFEKSPIAFLENKGYHNVRKENILCLPKYSLFELKNGRRRMLASAKELQKGNEIVLPVHLTTLLYHAKNIHRLDEPEHLEYIQKHRNEFKGLLNLVSEFSQKYVLADANLEKIKNLYADNEQADIEILANSFINLLTFTALGAPAAFKFFGKDVDRKRYTTVSEILNATLIHQSITGLYETRIDLSKLGED

SEQ ID NO: 171 - protein, 1360 aa, Streptococcus oralis
ENKNYSIGLDIGTNSVGWSVITDDYKVPSKKMKVLGNTDKRFIKKNLIGALLFDEGTTAEARRLKRTARRRYTRRKNRLRYLQEIFAEEMSKVDSSFFHRLDDSFLIPEDKRGSKYPIFATLAEEKEYHKQFPTIYHLRKQLADSKEKTDLRLIYLALAHMIKYRGHFLYEDTFDIKNNDIQKIFSEFISIYDNTFEGSSLSGQNAQVEAIFTDKISKSAKRERVLKLFPDEKSTGLFSEFLKLIVGNQADFKKHFDLGEKAPLQFSKDTYDEDLENLLGQIGDDFADLFLVAKKLYDAILLSGILTVTDPSTKAPLSASMIERYENHQKDLAVLKQFIKNNLPEKYDEVFSDQSKDGYAGYIDGKTTQEAFYKYIKNLLSKFEGTDYFLEKIEREDFLRKQRTFDNGSIPHQIHLQEMNAILRRQGEHYPFLKDNKEKIEKILTFRIPYYVGPLARGNRDFAWLTRNSDEAIRPWNFEEIVDKASSAEDFINKMTNYDLYLPEEKVLPKHSLLYETFAVYNELTKVKFIAEGLRDYQFLDSGQKKQIVTQLFKEKRKVTEKDIIQFLHNVDGYDGIELKGIEKQFNASLSTYHDLLKIIKDKEFMDDSKNEEILENIVHTLTIFEDREMIKQRLAQYDSLFDEKVIKALIRRHYTGWGKLSAKLIDGICDKQTGNTILDYLIDDGKNNRNFMQLINDDGLSFKEITQKAQVVGKTDDVKQVVQELPGSPAIKKGILQSIKIVDELVKVMGHTPESIVIEMARENQTTARGKKNSQQRYKRIEDALKNLASNILKEHPTNNIQLQNDRLFLYYLQNGRDMYTGKPLDINQLSSYDIDHIVPQAFIKDDSLDNRVLTSLKDNRGKSDNVPSIEVVQKRKAFWQQLLDSKLISERKFNNLTKAERGGLDERDKVGFIKRQLVETRQITKHVAQILDARFNKEVNEKDKKNRTVKIITLKSNLVSNFRKEFRLYKVREINDYHHAHDAYLNAVVAKAILKKYPKLEPEFVYGDYQKYDLSRNPKEVEKATEKYFFYSNLLNFFKEEVHYADGTIVKRENIEYSKDTGEIAWNKEKDFATIKKVLSYPQVNIVKKREVQTGGFSKESILPKGNSDKLIPRKTKDILWETTKYGGFDSPVIAYSILLIADIEKGKAKKLKTVKTLVGITIMEKAAFEENPITFLENKGYHNVRKENILCLPKYSLFELENGRRRLLASAKELQKGNEIVLPVYLTTLLYHSKNVHKLDEPEHLEYIQKHRNEFKDLLNLVSEFSQKYVLADANLEKIQNLYADNEQADIEILANSFINLLTFTALGAPAAFKFFGKDIDRKRYTTVSEILNATLIHQSITGLYETRIDLSKLGED

SEQ ID NO: 172 - protein, 1358 aa, Streptococcus parasanguinis
KKPYSIGLDIGTNSVGWAVITDDYKVPAKKMKVLGNTNKESIKKNLIGALLFDAGNTAADRRLKRTARRRYTRRRNRILYLQEIFAAEMNKVDESFFHRLDDSFLVPEDKRGSKYPIFGTLEEEKEYHKQFPTIYYLRKILADSKEKVDLRLIYLALAHIIKYRGHFLYEDSFDIKNNDIQKIFNEFTILYDNTFEESSLSKGNAQVEEIFTDKISKSAKRDRVLKLFPDEKSTGLFSEFLKLIVGNQADFKKHFDLEEKAPLQFSKDTYEEDLESLLGQIGDVYADLFVVAKKLYDAILLAGILSVKDPGTKAPLSASMIERYDNHQNDLSALKQFVRRNLPEKYAEVFSDDSKDGYAGYIDGKTTQEGFYKYIKNLISKIEGAEYFLEKIEREDFLRKQRTFDNGSIPHQIHLQEMNAILRHQGEYYPFLKENKDKIEQILTFRIPYYVGPLARGNSDFAWLSRNSDEAIRPWNFEEMVDKSSSAEDFIHRMTNYDLYLPEEKVLPKHSLLYETFTVYNELTKVKYIAEGMKDYQFLDSGQKKQIVNQLFKEKRKVTEKDIIHYLHNVDGYDGIELKGIEKHFNSSLSTYHDLLKIIKDKEFMDDPKNEEIFENIVHTLTIFEDRVMIKQRLNQYDSIFDEKVIKALTRRHYTGWGKLSAKLINGIRDKKTSKTILDYLIDDGYSNRNFMQLINDDGLSFKETIQKAQVVGETNDVKQVVQELPGSPAIKKGILQSIKIVDELVKVMGHAPESVVIEMARENQTTNKGKSKSQQRLKTLSDAISELGNILKEHPTDNIQLQNDRLFLYYLQNGKDMYTGEALDINQLSNYDIDHIIPQAFIKDDSLDNRVLTSSKDNRGKSDNVPSLEIVEKMKGFWQQLLDSKLISERKFNNLTKAERGGLDERDKVGFIKRQLVETRQITKHVAQILDDRFNAEVNEKNQKLRSVKIITLKSNLVSNFRKEFGLYKVREINDYHHAHDAYLNAVVAKAILKKYPKLEPEFVYGDYQKYDLTKDPKEIEKATEKYFFYSNLLNFFKDKVYYADGTIIQRGNVEYSKDTGEIAWNKKRDFAIVRKVLSYPQVNIVKKTEEQTGGFSKESILPKGNSDKLIPRKTKNVQLDTTKYGGFDSPVIAYSILLVADVEKGKSKKLKTVKSLIGITIMEKVKFEANPVAFLEGKGYQNVVEENIIRLPKYSLFELENGRRRMLASAKELQKGNEMVLPSYLIALLYHAKRIQKKDEPEHLEYIKQHHSEFNDLLNFVSEFSQKYVLAESNLEKIKNLYIDNEQTNMEEIANSFINLLTFTAFGAPAVFKFFGKDIERKRYSTVTEILKATLIHQSLTGLYETRIDLSKLGEE

SEQ ID NO: 173 - protein, 1327 aa, Streptococcus parauberis
MKVLGNTDRQTVKKNMIGTLLFDSGETAEARRLKRTARRRYTRRINRIKYLQSIFDDEMSKIDSAFFQRIKDSFLVPDDKNDDRHPIFGNIKDEVDYHKNYPTIYHLRKKLADSDEKADLRLIYLALAHIIKFRGHFLIEGDLDSQNTDVNALFLKLVDTYNLMFEDDIDTQTIDATVILTEKMSKSRRLENLIAKIPNQKKNTLFGNLISLSLGLTPNFKANFELSEDAKLQISKESFEEDLDNLLAQIGDQYADLFIAAKNLSDAILLSDILTVKGVNTKAPLSASMVQRFNEHQDDLKLLKKLVKVQLPEKYKEIFDIKDKNGYAGYINGKTSQEDFYKYIKPILSKLKGAESLISKLEREDFLRKQRTFDNGSIPHQIHLNELKSIIRRQEKYYPFLKDKQVRIEKIFTFRIPYFVGPLANGNSSFAWVKRRSNESITPWNFEEVVEQEASAKVFIERMTNFDTYLPEEKVLPKHSLLYEMFTVYNELTKVKYQAEGMRKPEFLSSEEKIEIVSNLFKTERKVTVKQLKENYFNKIRCLDSITISGVEDKFNASLGTYHDLLNIIKNQKILDDEQNQDSLEDIVLTLTLFEDEKMIAKRLSKYESIFDPSILKKLKKRHYTGWGRLSQKLINGIRDKQTGKTILDFLIDGQANRNFMQLINDPSLDFASIIKEAQEKTIKSEKLEETIANLAGSPAIKKGILQSVKIVDEVVKVMGYEPSNIVIEMARENQSTQRGINNSRERLRKLEEVHKNIGSKILKEHEISNAQLQSDRVYLYLLQDGKDMYTGKDLDFDRLSQYDIDHIIPQSFIKDNSIDNIVLTSQESNRGKSDNVPYIAIVNKMKSYWQHQLKSGAISQRKFDNLTKAERGGLSEYDKAGFIKRQLVETRQITKHVAQILNNRFNNNVDDSSKNKRPVKIITLKSKMVSDFRKEFGFYKIREVNDYHHAHDAYLNAVVGTALLKKYPKLEAEFVYGDYKHYDLSDTSLGKATAKMFFYSNIMNFFKKEVRLADGTVITRPQIETNTETGEIVWDKVKDIKTIRKVLSIPQINVVKKTEVQTGGFSKESILSKRDSDKLIPRKNNWDPKKYGGFGSPIIAYSVLVVAKVTKGKSQKTKSVKELVGITIMEQNEFEKDRITFLEKKGYQDIQESLIIKLPKFSLFELENGRKRLLASELQKGNELSLPNKYIQFLYLASRYTSFSGKEEDREKHRHFVESHLHYFDEIKDIIADFSRRYILADANLEKILTLYNEKNQFSIEEQATNMLNLFTFTGLGAPATLKFFNVDIDRKRYTSSTEILNSTLIRQSITGLYETRIDLSKIGGD

SEQ ID NO: 174 - protein, 1355 aa, Streptococcus phocae
KKSYSIGLDIGTNSVGWAVITDDYKVPAKKMKVLGNTSRQSIKKNMIGALLFDEGGPAASTRVKRTTRRRYTRRKNRLCYLRDIFESEMHTIDKHFFLRLEDSFLHKSDKRYEAHPIFGTLQEEKAYHDNYPTIYHLRKALADNTEKADLRLIYLALAHIIKFRGHFLIEGALSANNTDVQQLVHALVDAYNIMFEEDLDIEAIDVKAILTEKISKTRRLENLISNIPGQKKNGLFGNLIALSLGLTPNFKSHFNLPEDAKLQLAKDTYDEELNNLLTQIGDEYADLFLSAKNLSDAILLSDILTVNGDGTQAPLSASLIKRYEEHRQDLALLKQMFKEQLPDLYRDVFTDENKDGYAGYISGKTSQEAFYKYIKPILETLDGAEDFLTKINREDFLRKQRTFDNGSIPHQIHLGELQAILERQQAYYPFLKDNQEKIEKILTFRIPYYIGPLARGNSRFAWLTRTSDQKITPWNFDEMVDQEASAQAFIERMTNFDEYLPQEKVLPKHSLTYEYFTVYNELTKVKYVTEGMTKPEFLSAGQKEQIVELLFKKYRKVTVKQLKEDFFSKIECFDTVDISGVEDKFNASLGTYHDLLKIIKDKAFLDNSENENIIEDIILTLTLFEDKEMIANRLAVYEDLFDQNVLKQLKRRHYTGWGRLSKQLINGMRDKHTGKTILDFLKDGFINRNFMQLINDDNLSFKEEIKKAQEGGLKDSINDQIRDLAGSPAIKKGILQTINIVDEIVKIMGKAPQHIVVEMARDVQKTDIGVKQSRERMKRVQEVLKKLGSQLLKEHPVENFQLQNERLYLYYLQNGKDMYTGEELSISNLSHYDIDHIIPRSFIKDDSIDNKVLTRSEHNRGKTDNVPSIEVVKRMKPYWQKLLDTKVISQRKFDNLTKAERGGLQESDKANFIQRQLVETRQITKHVAQILDSRFNTERDEKDRPIRRVKVITLKSKFVSDFRQDFGFYKLREINDYHHAHDAYLNAVVGTALLKMYPKLASEFVYGDYQKYDLSGKASGHATAKYFFYSNLMNFFKSEVKLANGNIIKRSPIEVNEETGEIVWDKTKDFGTVRKVLSAPQVNIVKKTEIQTGGFSNETILSKGKSSKLIPRKNKWRDTTKYGGFNTPTVAYSVLVVAKVEKGKAKKLKPVKELVGITIMERTKFEANPIAFLESKGYHDIQEHLMITLPKYSLFELENGRRRLLASELQKGNEMVLPQHLVTFLYRVSKRDKGTQSENMEYISNHKEKFIEIFHYIIRYAEKNVIKPKVIERLNDTFNQKFNDSDLTELSISFLNLFKFTSFGAPEKFTFLNSEIKQDDVRYRSTKECLNSTLIHQSVTGLYETRIDLSQFGGD

SEQ ID NO: 175 - protein, 1361 aa, Streptococcus pseudopneumoniae
SNKPYSIGLDIGTNSVGWAVITDDYKVPSKKMKVLGNTDKHFIKKNLIGALLFDEGTTAEDRRLKRTARRRYTRRKNRLRYLQEIFSEEISKVDNSFFHRLDDSFLVPEDKRGSKYPIFATLTEEKEYYKQFPTIYHLRKQLADSKEKADLRLIYLTLAHMIKYRGHFLYEESFDIKNNDIQKIFNEFISIYDNTFEGSSLSGQNAQVEAIFTDKISKSTKRERVLKLFPDQKSTGLFSEFLKLIVGNQADFKKHFDLEEKAPLQFSKDTYDEDLENLLGQIGDDFADLFLVAKKLYDAILLSGILTVTDPSTKAPLSASMIERYENHQKDLAALKQFIKNNLPEKYDEVFSDQSKEGYAGYIDSKTTQEAFYKYIKNLLSKIDGADYLLDKIEREDFLRKQRTFDNGSIPHQIHLQEMNAILRRQGEHYPFLKENREKIEKILTFRIPYYVGPLARGNRDFAWLTRNSDQAIRPWNFEEIVDKASSAEAFINKMTNYDLYLPEEKVLPKHSLLYETFAVYNELTKVKFIAEGLRDYQFLDSGQKKKIINQLFKEKRKVTEKDLIHYLHNVDGYDGIELKGIEKQFNASLSTYHDLLKIIKDKRFMDEPKNQEILENIVHTLTIFEDREMIKQRLAQYASIFDEKVIKTLTRRHYTGWGKLSAKLINCIRDRKTGKTILDYLIDDGYNNRNFMQLINDDGLSFKEIIQESQVVGKPDDVKQIVQELPGSSAIKKGILQSIKLVDELVKVMGHDPESIVIEMARENQTTARGKKNSQQRYKRIEDSLKILASNILKEHPTDNIQLQNDRLFLYYLQNGKDMYTGNPLDINHLSSYDIDHIIPQAFIKDDSLDNRVLTSSKDNRGKSDNVPSLEVVQKRKAFWQQLLESKLISERKFNNLTKAERGGLNERDKVGFIKRQLVETRQITKHVAQILDSRFNTKVNEKNQKIRTVKIITLKSNLVSNFRKEFRLYKVREINDYHHAHDAYLNAVVAKAILKKYPKLEPEFVYGDYQKYDLSRDPKEIEKATEKYFFYSNLLNFFKEEVHYADGTIVKRENIEYSKDTGEIAWNKEIDFATIRKILSLSQVNIVKKTEEQTGGLFDNNIVSKKKVVDASKLIPIKSGLSPEKYGGYARPTIAYSVLVIADIEKGKAKKLKRIKEMVGITIQDKKKFEANPTAYLEEYGYKNINPNLIIKLPKYSLFKFNDGQRRLLASSIELQKGNELILPYHFTTLLYHAQRINKISEPIHKQYVETHQSEFEELLTTIISLSKKYIQKPIVESLLQQAFEQADKDIYQLSESFISLLKLTSFGAPGAFRFLGVEISQSNVRYQSVSSCFNATLIHQSITGLYETRIDLSKLGED

SEQ ID NO: 176 - protein, 1361 aa, Streptococcus pseudopneumoniae
SNKPYSIGLDIGTNSVGWVIITDDYKVPSKKMKVLGNTDKHFIKKNLIGALLFDEGTTAEDRRLKRTARRRYTRRKNRLRYLQEIFAEEMNKVDSSFFHRLDDSFLVPEDKRGSKYPIFATLAEEKEYHKNFPTIYHLRKQLADSKEKADLRLIYLALAHMIKYRGHFLYEEAFDIKNNDIQKIFNEFINIYDNTFEGSSLSGQNEQVEAIFSDKISKSAKRERVLKLFPDEKSTGLFSEFLKLIVGNQADFKKHFDLEEKAPLQFSKDTYDEDLENLLGQIGDGFADLFLVAKKLYDAILLSGILTVTDPSTKAPLSASMIERYQNHQNDLASLKQFIKNNLPEKYDEVFSDQSKDGYAGYVDGKTTQEAFYKYIKNLLSKFEGADYFLEKIEREDFLRKQRTFDNGSIPHQIHLQEMNAILRRQGEHYPFLKENKEKIEKILTFRIPYYVGPLARGNRDFAWLTRNSDQAIRPWNFEEIVDKASSAEDFINKMTNYDLYLPEEKVLPKHSLLYETFAVYNELTKVKFIAEGLRDYQFLDSGQKKQIVNQLFKEKRKVTEKDIIQYLHNVDGYDGIELKGIEKQFNASLSTYHDLLKIIKDKEFMDDSKNEEILENIVHTLTIFEDREMIKQRLAQYDSIFDEKVIKALTRRHYTGWGKLSAKLINGIRDKQTGKTILDYLIDDGYSNRNFMQLINDDGLSFKEIIQKAQVFGKTNDVKQVVQELPGSPAIKKGILQSIKIVEELVKVMGHEPESIVIEMARENQTTTRGKKNSQQRYKRIENSLKILASKILKEHPTDNNQLQNDRLFLYYLQNGKDMYTGEALDINQLSSCDIDHIIPQAFIKDDSLDNRVLTSSKENRGKSDNVPCLEVVDKMKVFWQQLLDFKLISYRKFNNLTKAERGGLDERDKVGFIRRQLVETRQITKHVAQILDSRFNTEVTEKDKKNRNVKIITLKSNLVSNFRKEFGLYKVREINDYHHAHDAYLNAVVAKAILKKYPKLEPEFVYGDYQKYDLSKDPKDIEKATEKYFFYSNLLNFFKEEVHYADGTIVKRENIEYSKDTGEIAWNKEKDFATIKKILSLPQVNIVKKTEEQTGGLFDNNIVSKKKVVDASKLIPIKSGLSPEKYGGYARPTIAYSVLVIADIEKGKTKKLKRIKEMIGITVQDKKIFESNPIAYLEECGYKNINPNLIIKLPKYSLFEFNGGQRRLLASSIELQKGNELILPYHFTALLYHTQRINKISEPIHKQYVEAHQNEFKELLTTIISLSKKYIQKPNVESLLQQAFEQADKDIYQLSESFISLLKLTSFGAPGAFKFLGVEISQSSVRYKPNSQFLDATLIHQSITGLYETRIDLSKLGED

SEQ ID NO: 177 - protein, 1363 aa, Streptococcus pseudopneumoniae
SNKPYSIGLDIGTNSVGWAVITDDYKVPSKKMTVLGNTDKHFIKKNLIGALLFDEGTTAEDRRLKRTARRRYTRRKNRLRYLQEIFSGEMSKVDSSFFHRLDDSFLVPEDKRGSKYPIFATLVEEKEYHKQFPTIYHLRKQLADSKEKADLRLIYLVLAHMIKYRGHFLYEEAFDIKNNDIQKIFNEFISIYDNTFEGSSLSGQNAQVETIFTDKISKSAKRERVLKLFPDEKSTGLFSEFLKLIVGNQADFKKHFDLGEKAPLQFSKDTYDEDLENLLGQIGDDFADLFLVAKKLYDAILLSGILTVTDPSTKAPLSASMIERYENHQKDLTTLKQFIKNNLPEKYDEVFSDQSKDGYAGYIDGKTTQEAFYKYIKNLLSKFEGTDYFLEKIEREDFLRKQRTFDNGSIPHQIHLQEMNAILRRQGEHYPFLKENKEKIEKILTFRIPYYVGPLARGNRDFAWLTRNSDQAIRPWNFEEIVDKASSAEDFINKMTNYDLYLPEEKVLPKHSLLYETFAVYNELTKVKFIAEGLRDYQFLDSGQKKQIVNQLFKEKRKVTEKDIIHYLHTVDGYDGIELKGIEKQFNASLSTYHDLLKIIKDKEFMDDSKNEAILENIVHTLTIFEDREMIKQRLAQYDSLFDKKVIKALTRRHYTGWGKLSAKLINGICDKQTGNTILDYLIDDGEINRNFMQLINDDGLSFKKIIQKSQVVGETDDVKQVVRELPGSPAIKKGILQSIKIVDELVKVMDHAPESIVIEMARENQTTARGKKNSQQRYKRIEDSLKILASNILKENPTDNNQLQNDRLFLYYLQNGKDMYTGEALDINQLSSYDIDHIIPQAFIKDDSLDNRVLTSSKDNRGKSDNVPSLEVVQKRKAFWQQLLDSKLISERKFNNLTKAERERDGLNELDKVGFIKRQLVETRQITKHVAQILDARFNKEVTEKDKKNRNVKIITLKSNLVSNFRKEFRLYKVREINDYHHAHDAYLNAVVAKAILKKYPKLEPEFVYGDYQKNDLSKDPKDIEKATEKYFFYSNLLNFFKEEVHYADGTIVKRENIEYSKDTGEIAWNKEKDFATIKKVLSYPQVNIVKKTEEQTGGLFDNNIVSKEKVVDASKLIPIKSGLSPEKYGGYARPTIAYSVLVIADIEKGKTKKLKRIKEMVGITIQDKKKFEANPIAYLEECGYKNINPNLIIKLPKYSLFEFNGGQRRLLASSIELQKGNELILPYHFTALLYHAQRINKFSEPIHKQYVEAHQNEFKELLTIIISLSKKYIQKPNVESLLHQAFEQADNDIYQLSESFISLLKLTSFGAPGAFKFLGAEISQSSVRYKPNSQFLDTTLIHQSITGLYETRIDLSKLGED

SEQ ID NO: 178 - protein, 1360 aa, Streptococcus pseudoporcinus
YSYSIGLDIGTNSVGWAVINEDYKVPAKKMTVFGNTDRKTIKKNLLGTVLFDSGETAQARRLKRTNRRRYTRRRYRLCQLQNIFATEMVKVDDTFFQRLSESFFYYQDKAFDKHPIFGNSKEERAYHKTYPTIYHLRKDLADRDQKADLRLIYLALSHIIKFRGHFLIEGKLNSENTDVQKLFIALVTVYNLLFEEEIAGETCDAKALLTAKTSKSKRLESLISEFPGQKKNGLFGNLLALALGLRPNFKSNFGLSEDAKLQITKDTYEEELDNLLAEIGDHYADLFLAAKNLSDAILLSDILTLSDENTRAPLSASMIKRYEEHQEDLALLKKLVKEQMPEKYWEIFSNAKKNGYAGYIEGKVSQEDFYRYIKPILSRLKGGDEFLAKIDRDDFLRKQRTFDNGSIPHQIHLKELHAILRRQEKYYPFLAEQKEKIEQLLCFRIPYYVGPLAKGGNSSFAWLKRRSDEPITPWNFKDVVDEEASAQAFIEGMTNYDTYLPEEKVLPKHSPLYEMFTVYNELTKVKYIAENMTKPLYLSAEQKEAIIDHLFKQTRKVTVKDLKEKYFSQIEGLENVDVTGVEGAFNASLGTYNDLLKIIKDKAFLDDEANAEILEEIVLILTLFQDEKLIEKRLAKYANLFEKSVLKKLRKRHYRGWGRLSRQLIDGMKDKASGKTILDFLKDDFANRNFIQLINDSSLDFEKLIDDAQKKAIKRESLTEAVANLAGSPAIKKGILQSLKVVDEIVKVMGHNPDNIVIEMSRENQTTAQGLKNARQRLKKIKEVHKKTGSRILEDNSERITNLTLQDNRLYLYLLQDGKDMYTGQDLDINNLSQYDIDHIIPQSFIKDNSIDNLVLTTQKANRGKSDNVPSIEVVRDMKDRVWRRQLANGAISRQKFDHLTKAERGGLADSDKARFLRRQLVETRQITKHVAQLLDSRFNSKSNQNKKLARNVKIITLKSKIVSDFRKDFGLYKLREVNNYHHAHDAYLNAVVGTALLKKYPKLEAEFVYGDYKHFDLSDPSLGKATAKVFFYSNIMNFFKEELSLADGTLMKRPVIETNTETGEVVWDKVKDFKTIRKVLSYPQVNIVKKTEIQSGAFSKESVLSKGNSDKLIERKKGWDPKKYGGFDSPNTAYSIFVVAKVAKRKAQKLKTVKEIVGITIMEQAEYEKDNIAFLEKKGYQDIQEKLLIKLPKYSLFELENGRRRLLASEFQKGNELALSGKYMKFLYLASRYDKLSSKIESEQQKKLFVEQHLHYFDEILDIVVKHATCYIKAENNLKKIISLYKKKEAYSINEQALNMLNLFIFTSLGAPSTFVFFDETIDRKRYTTSSDVLNGILIQQSITGLYETRIDLSRFGGD

SEQ ID NO: 179 - protein, 1316 aa, Streptococcus pseudoporcinus
MLGTVLFDSGETAQARRLKRTNRRRYTRRRYRLCQLQNIFATEMVKVDDTFFQRLSESFFYYQDKAFDKHPIFGNSKEERAYHKTYPTIYHLRKDLADRDQKADLRLIYLALSHIIKFRGHFLIEGKLNSENTDVQKLFIALVTVYNLLFEEEIAGETCDAKALLTAKTSKSKRLESLISEFPGQKKNGLFGNLLALALGLRPNFKSNFGLSEDAKLQITKDTYEEELDNLLAEIGDHYADLFLAAKNLSDAILLSDILTLSDENTRAPLSASMIKRYEEHQEDLALLKKLVKEQMPEKYWEIFSNAKKNGYAGYIEGKVSQEDFYRYIKPILSRLKGGDEFLAKIDRDDFLRKQRTFDNGSIPHQIHLKELHAILRRQEKYYPFLAEQKEKIEQLLCFRIPYYVGPLAKGGNSSFAWLKRRSDEPITPWNFKDVVDEEASAQAFIEGMTNYDTYLPEEKVLPKHSPLYEMFTVYNELTKVKYIAENMTKPLYLSAEQKEAIIDHLFKQTRKVTVKDLKEKYFSQIEGLENVDVTGVEGAFNASLGTYNDLLKIIKDKAFLDDEANAEILEEIVLILTLFQDEKLIEKRLAKYANLFEKSVLKKLRKRHYRGWGRLSRQLIDGMKDKASGKTILDFLKDDFANRNFIQLINDSSLDFEKLIDDAQKKAIKRESLTEAVANLAGSPAIKKGILQSLKVVDEIVKVMGHNPDNIVIEMSRENQTTAQGLKNARQRLKKIKEVHKKTGSRILEDNSERITNLTLQDNRLYLYLLQDGKDMYTGQDLDINNLSQYDIDHIIPQSFIKDNSIDNLVLTTQKANRGKSDNVPSIEVVRDMKDRVWRRQLANGAISRQKFDHLTKAERGGLADSDKARFLRRQLVETRQITKHVAQLLDSRFNSKSNQNKKLARNVKIITLKSKIVSDFRKDFGLYKLREVNNYHHAHDAYLNAVVGTALLKKYPKLEAEFVYGDYKHFDLSDPSLGKATAKVFFYSNIMNFFKEELSLADGTLMKRPVIETNTETGEVVWDKVKDFKTIRKVLSYPQVNIVKKTEIQSGAFSKESVLSKGNSDKLIERKKGWDPKKYGGFDSPNTAYSIFVVAKVAKRKAQKLKTVKEIVGITIMEQAEYEKDNIAFLEKKGYQDIQEKLLIKLPKYSLFELENGRRRLLASEFQKGNELALSGKYMKFLYLASRYDKLSSKIESEQQKKLFVEQHLHYFDEILDIVVKHATCYIKAENNLKKIISLYKKKEAYSINEQALNMLNLFIFTSLGAPSTFVFFDETIDRKRYTTSSDVLNGILIQQSITGLYETRIDLSRFGGD

SEQ ID NO: 180 - protein, 1359 aa, Streptococcus sanguinis
KKPYSIGLDIGTNSVGWAVVTDDYKVPAKKMRVFGDTDRSHIKKNLLGTLLFDDGNTAESRRLKRTARRRYTRRRNRILYLQEIFTESMNEIDESFFHRLDDSFLVPEDKRGSKYPIFATLQEEKEYHKQFPTIYHLRKQLADSKEKSDVRLIYLALAHMIKYRGHFLYEETFDIKNNDIQKIFNEFINIYDNTFEGSSLSGQNAQVEAIFTDKISKSAKRERVLKLFPDEKSTGLFSEFLKLIVGNQADFKKHFDLEEKAPLQFSKDTYDEELENLLGQIGDDFADLFLIAKKLYDAILLSGILTVTDPSTKAPLSASMIERYENHQKDLAALKQFIKNNLPEKYVEVFSDQSKDGYAGYIDGKTTQEAFYKYIKNLLSKFEGADYFLDKIEREDFLRKQRTFDNGSIPHQIHLQEMNAILRRQGEHYPFLKENREKIEKILTFRIPYYVGPLARDNRDFSWLTRNSDEPIRPWNFEEVVDKARSAEDFIHRMTNYDLYLPEEKVLPKHSLLYETFAVYNELTKVKFIAEGLRDYQFLDSGQKKQIVNQLFKEKRKVTEKDIIHYLHNVDGYDGIELKGIEKQFNANLSTYHDLLKITKDKEFMDDPKNEEILENIVHTLTIFEDREMIKQRLAQYDTLFDEKVIKALTRRHYTGWGKLSAKLINGIRDKQSGKTILDYLIDDDKINRNFMQLINDDGLSFKEIIQKAQVVGKTDDVKQVVQELPGSPAIKKGILQSIKIVDELVKVMGYALESIVIEMARENQTTARGKKNSQQRYKRIEDALKNLAPNILKENPTDNIQLKNDRLFLYYLQNGKDMYTGKPLDINQLSSYDIDHIIPQAFIKDDSIDNRVLTSSKDNRGKSDNVPSLEVVQKRKAFWQQLLDSKLISERKFNNLTKAERGGLDERDKVGFIRRQLVETQQITKNVAQILDARFNTEVKEKNQKIRTVKIITLKSNLVSNFRKEFGLYKVREINNYHHAHDAYLNAVVAKAILKKYPKLEPEFVYGDYQKYDLFKPSKEIEKATEKYFFYSNLLNFFKEEVLYADGTIRKRENIEYSKDTGEIAWDKEKDFATIKKVLSYPQVNIVKKREVQTGGFSKESILPKGNSDKLIPRKTKDILWDTTKYGGFDSPVIAYSILLIADIEKGKAKKLKTVKTLVGITIMEKAAFEENPITFLENKGYHNVRKENILCLPKYSLFELENGRRRLLASAKELQKGNEIVLPVCLTTLLYHSKNLHKLDEPEHLEYIQKHRNEFKDLLNLVSEFSQKYILAEANLEKIKDLYADNEQADIEILANSFINLLTFTALGAPAAFKFFGKDVDRKRYTTVSEILNATLIHQSITGLYETRIDLSKLGEE

SEQ ID NO: 181 - protein, 1362 aa, Streptococcus sanguinis
KKPYSIGLDIGTNSVGWAVITDDYKVPSKKMKVLGNTDKHFIKKNLIGALLFDEGTTAEDRRLKRTSRRRYTRRKNRLRYLQEIFSEEISKLDSSFFHRLDDSFLVPEDKRGSKYPIFATLEEEKEYHKKFPTIYHLRKHLADSKEKTDLRLIYLALAHMIKYRGHFLYEESFDIKNNDIQKIFNEFISIYDNTFEGSSLSGQNAQVEAIFTDKISKSTKRERVLKLFSDEKSTGLFSEFLKLIVGNQADFKKHFDLEEKAPLQFSKDTYDEDLENLLGQIGDGFADLFLVAKKLYDAILLSGILTVTDPSTKAPLSASMIERYENHQEDLAALKQFIKNNLSEKYAEVFSDQSKDGYAGFIDGKTTQEAFYKYIKNLLSKLEGADYFLNKIEREDFLRKQRTFDNGSIPHQIHLQEMNAILRRQGEHYLFLKENREKIEKILAFRIPYYVGPLARGNRDFAWLTRNSDQAIRPWNFEEVVDKASSAEDFINKMTNYDLYLPEEKVLPKHSLLYETFAVYNELTKVKFIAEGLRDYQFLDSGQKKQIVNQLFKDKRKVTEKDIIHYLHNVDGYDGIELKGIEKQFNASLSTYHDLLKIIKDKEFMDNPKNGEILENIIHTLTIFEDREMIKQRLAQYDTLFDEKVIKALTRRHYTGWGKLSAKLINGIRDKQTGKTILEYLIDDGDCNRNFMQLINDDGLSFKEIIQKAQVVGKTDDVKQVVQEIPGSPAIKKGILQSIKIVDELVKVMGHNPESIVIEMARENQTTAKGKKNSQQRYKRIEDALKNLAPNILKENPTDNIQLQNDRLFLYYLQNGKDMYTGKAIDINQLSNYDIDHIIPQAFIKDDSLDNRVLTSSKDNRGKSDNVPSIEVVQKRKAFWQQLLDSKLISERKFNNLTKAKRGGLDERDKVGFIKRQLVETRQITKHVAQLLDTRFNTEVNEENQKIRTVKIITLKSNLVSNFRKEFGLYKVREINDYHHAHDAYLNAVVAKAILKKYPKLEPEFVYGDYQKYDLSKASNTIDKATEKYFFYSNLLNFFKEKVRYADGTIKKRENIEYSNDTGEIAWNKEKDFATIKKVLSLPQVNIVKKTEEQTGGLFDNNIVSKKKVVDASKLIPIKSSLSPEKYGGYARPTIAYSVLVIADIEKGKGKAKKLKRIKEIVGITIQDKKKFESNPVTYLEECGYKNINSNLIIKLPKYSLFEFNDGQRRLLASSIELQKGNELILPYHLTALLYHAQRINKISEPIHKQYVEAHQNEFKELLTTIISLSKKYIQKPNVELLLQQAFDQADKDIYQLSESFISLLKLTSFGAPGAFKFLGVEISQSSVRYKPNSQFLDTTLIHQSITGLYETRIDLSKLGED

SEQ ID NO: 182 - protein, 1360 aa, Staphylococcus aureus
ENKNYSIGLDIGTNSVGWSVITDDYKVPSKKMKVLGNTDKHFIKKNLIGALLFDEGTTAEARRLKRTARRRYTRRKNRLRYLQEIFSEEIGKVDSSFFHRLDDSFLIPEDKRGSKYPIFATLAEEKKYHKQFPTIYHLRKQLADSKEKTDLRLIYLALAHMIKYRGHFLYEEAFDIKNNDIQKIFNEFISIYNNTFEGNSLSGQNVQVEAIFTDKISKSAKRERVLKLFPDEKSTGLFSEFLKLIVGNQADFKKHFDLEEKAPLQFSRDTYDEDLENLLGQIGDDFADLFLVAKKLYDAILLSGILTVTNPSTKAPLSASMIERYENHQKDLASLKQFIKNNLPEKYDEVFSDQSEDGYAGYIDGKTTQETFYKYIKNLLSKFEGADYFLDKIEREDFLRKQRTFDNGSIPHQIHLQEMNAILRRQGEHYPFLKENKEKIEKILTFRIPYYVGPLARGNRDFAWLTRNSDQAIRPWNFEEIVDKASSAEDFINKMTNYDLYLPEEKVLPKHSLLYETFAVYNELTKVKFIAEGLRDYQFLDSGQKKQIVTQLFKEKRKVTEKDIIQFLHNVDGYDGIELKGIEKQFNASLSTYHDLLKIIKDKAFMDDAKNEAILENIVHTLTIFEDREMIKQRLAQYDSLFDEKVIKALTRRHYTGWGKLSAKLINGISDKQTGNTILDYLIDDGEINRNFMQLINDDGLSFKEIIQKAQVVGKTNDVKQVVQELPGSPAIKKGILQSIKIVDELVKVMGHAPESIVIEMARENQTTARGKKNSQQRYKRIEDSLKILASKILKEHPTDNIQLQNDRLFLYYLQNGKDMYTGEALDINQLSSCDIDHIIPQAFIKDDSLDNRVLTSSKDNRGKSDNVPSLEVVDKMKVFWQQLLDSKLISYRKFNNLTKAERGGLNELDKVGFIKRQLVETRQITKHVAQILDARFNKEVTEKDKKNRTVKIITLKSNLVSNFRKEFELYKVREINDYHHAHDAYLNAVVAKAILKKYPKLEPEFVYGDYQKYDLSKDPKEIEKATEKYFFYSNLLNFFKEEVHYADGTIVKRENIEYSKDTGEIAWNKEKDFATIKKVLSLPQVNIVKKREVQTGGFSKESILPKGNSDKLIPRKTKDILWDTTKYGGFDSPVIAYSILLIADIEKGKAKKLKTVKTLVGITIMEKDAFEKNPIAFLENKGYHNVCKENILCLPKYSLFELENGRRRLLASAKELQKCNEIVLPVYLTTLLYHSKNVHKLDEPGHLEYIQKHRNEFKDLLNLVSEFSQKYVLADANLEKIKNLYADNEQADIEILANSFINLLTFTALGAPAAFKFFGKDVDRKRYTTVSEILNATLIHQSITGLYETRIDLSKLGED

SEQ ID NO: 183 - protein, 1360 aa, Staphylococcus aureus
MKKPYSIGLDIGTNSVGWSVVTDDYKVPAKKMKVLGNTDKEYIKKNLIGALLFDSGETAEATRMKRTARRRYTRRRNRILYLQDIFSPELNQVDESFLHRLDDSFLVAEDKRGERHVIFGNIADEVKYHKEFPTIYHLRKHLADSSEKADLRLVYLALAHIIKYRGHFLIDEPIDIRNMNSQNLFKEFLLAFDGIQVDCYLASKHTDISGIITAKISKSRKVEAVLEQFPDQKKNSFFGNMVSLVFGLMPNFKSNFELDEDAKLQFSRDSYDEDLENLLGIIGDEYADVFVAAKKVYDSILLSGILTTNNHSTKAPLSASMIDRYDEHNSDKKLLRDFIRTNIGKEVFKEVFYDTSKNGYAGYIDGKTNQEDFYKYLKNLLQKVDGGDYFIEKIEREDFLRKQRTFDNGSIPHQVHLDEMKAILRRQGEFYPFLKENAEKIQQILTFKIPYYVGPLARGNSRFAWASYNSNEKMTPWNFDNVIDKTSSAQAFIERMTNNDLYLPDQKVLPKHSLLYQKFAVYNELTKIKYVTETGEARLFDVFLKKEIFDGLFKKERKVTKKKILNFLDKNFDEFRITDIQGLDNETGNFNASYGTYHDLLKIIGDKEFMDSSDNVDVLEDIVLSLTLFEDREMIKQRLLKYEDIFSKKVIANLTRRHYTGWGRLSAKLINGIKDKHSRKTILDYLIDDGHSNRNFMQLINDDNLSFKDEIANSQVIGDGDDLHQVVQELAGSPAIKKGILQSLKIVDELVKVMGYNPEQIVVEMARENQTTARGRNNSQQRLGSLTKAIQDFGSDILKRYPVENNQLQNDQLYLYYLQNGKDMYTGDTLDIHNLSQYDIDHIIPQSFIKDNSLDNRVLTNSKSNRGKSDNVPSNEVVKRMKGFWLKQLDAKLISQRKFDNLTKAERGGLSAEDKAGFIKRQLVETRQITKHVARILDERFNRDFDKNDKRIRNVKIVTLKSNLVSNFRKEFGFYKVREINNFHHAHDAYLNAVVAKALLIRYPKLEPEFVYGEYPKYNSYRERKATEKMFFYSNIMNMFKTTIKLADGRVVEKPVIEANEETGEIAWDKTKHFANVKKVLSYPQVSIVKKVEEQTGGFSKESILPKGGSDKLIARKTKNNYLSTQKYGGFDSPTVAYSIMFVADIEKGKSKRLKTVKEMIGITIMERSRFESNSVTFLEEKGYRNIRENTIIKFPKYSLFELENGRRRLLASAIELQKGNEMFLPQQFVNLLYHAQHANKEDSVIYLEKHRHELSELFHHIIGVSEKTILKPKVEMTLNEAFEKHFEFDEVSELAQSFISLLKFTAFGAPGGFKFLDADIKQSNLRYQTVTEVLSSTLIHQSVTGLYETRIDLSKLGGE

SEQ ID NO: 184 - protein, 1364 aa, Staphylococcus aureus
SNKSYSIGLDIGTNSVGWAVITDDYKVPSKKMKVLGNTDKHFIKKNLIGALLFDEGTTAEDRRLKRTARRRYTRRKNRLRYLQEIFSQEISKVDSSFFHRLDDFFLVPEDKRGSKYPIFATLVEEKEYHKKFPTIYHLRKHLADSKEKTDLRLIYLALAHMIKYRGHFLYEESFDIKNNDIQKIFSEFISIYDNTFEGKSLSGQNAQVEAIFTDKISKSTKRERVLKLFPDEKSTGLFSEFLKLIVGNQADFKKHFDLEEKAPLQFSKDTYDEDLENLLGQIGDDFADLFLVAKKLYDAILLSGILTVKDLSTKAPLSASMIERYENHQKDLAALKQFIQNNLQEKYDEVFSDQSKDGYAGYIDGKTTQEAFYKYIKNLLSKFEGADYFLDKIEREDFLKKQRTFDNGSIPHQIHLQEMNAIIRRQGEHYPFLQENKEKIEKILTFRIPYYVGPLARGNGDFAWLTRNSDQAIRPWNFEEIVDQASSAEDFINKMTNYDLYLPEEKVLPKHSLLYETFAVYNELTKVKFIAEGLTRYQFLDKKQKKDIFDTFFKAENKRKVTEKDIIHYLHNVDGYDGIELKGIEKQFNASLSTYHDLLKIIKDKAFMDDSKNEEILENIIHTLTIFEDREMIKQRLAQYDSLFDEKVIKALTRRHYTGWGKLSAKLINGIRDKKSGKTILDYLIDDGEINRNFMQLIHDDGLSFKEIIQKAQVFGKTNDVKQVVQELPGSPAIKKGILQSIKIVDELVKVMGHAPESIVIEMARENQTTARGKKNSQQRYKRIEDSLKNLASNILKENPTDNIQLQNDRLFLYYLQNGRDMYTGKPLEINQLSNYDIDHIIPQAFIKDDSLDNRVLTSSKDNRGKSDNVPSLEVVEKMKAFWQQLLDSKLISERKFNNLTKAERERGGLNELDKVGFIKRQLVETRQITKHVAQFLDARFNKEVTEKDKKNRNVKIITLKSNLVSNFRKEFGLYKVREINDYHHAHDAYLNAVLAKAILKKYPKLEPEFVYGDYQKYDLSREPKEVEKATQKYFFYSNLLNFFKEEVHYADGTIVKRENIEYSKDTGEIAWNKEKDFATVKKVLSLPQVNIVKKTEVQTGGFSKESILPKGNSDKLIPRKTKEILWDTTKYGGFDSPVIAYSILLIADIEKGKAKKLKTVKTLVGITIMEKATFEKNPITFLENKGYHNVRKENILCLPKYSLFELESGRRRMLASAKELQKGNEIVLPVYLTTLLYHSKNVHKLDEPEHLEYIQKHRYEFKDLLNLVSEFSQKYVLADANLEKIKNLYADNEQADIEILANSFINLLTFTALGAPAAFKFLGKDVDRKRYTTVSEILNATLIHQSITGLYETRIDLSKLGED

SEQ ID NO: 185 - protein, 1360 aa, Staphylococcus aureus
NNNNYSIGLDIGTNSVGWAVITDDYKVPSKKMRVLGNTDKRFIKKNLIGALLFDEGTTAEDRRLKRTARRRYTRRKNRLRYLQEIFAEEMSKVDSSFFHRLDDSFLVPEDKSGSKYPIFATLAEEKEYHKKFPTIYHLRKHLADSKEKADLRLIYLALAHITKYRGHFLYEEAFDIKNNDIQKIFNEFINIYDNTFEGSSLSGQNAQVEAIFTGKISKSVKREHVLKLFPDEKSTGLFSEFLKLIVGNQADFKKHFDLEEKASLQFSKDTYDEDLENLLGQIGDDFADLFLVAKKLYDAILLSGILTVTDPSTKAPLSASMIERYENHQEDLAALKQFIKNNLPEKYAEVFSDQSKDGYAGYIDGKTTQEAFYKYIKNLLSKFEGADYFLDKIEREDFLRKQRTFDNGSIPHQIHLQEMNAILRRQGEHYPLLKENKEKIEKILTFRIPYYVGPLARGNRDFAWLTRNSDQAIRPWNFEEIVDKASSAESFINKMTNYDLYLPEEKVLPKHSLLYETFAVYNELTKVKFIAEGLRDYQFFDSGQKKQIVNQLFKEKRKVTEKDIIHYLHNVDGYDGIELKGIEKQFNASLSTYHDLLKIIKDKEFMDNHKNQEILENIVHTLTIFEDREMIKQRLAQYDSIFDEKVIKALTRRHYTGWGKLSAKLINGICDKKTGKTILDYLIDDGYNNRNFMQLINDDGLSFKEIIQKAQVVGKTDDLTQVVRELSGSPAIKKGILQSIKIVDELVKIMGYAPESIVIEMARENQTTAKGKKNSQQRYKRIEDALKNLAPTISKENPTDNIQLQNDRLFLYYLQNGKDMYTGEALDINQLSSYDIDHIIPQAFIKDDSLDNRVLTSSKDNRGKSDNVPSLEVVKKRKAFWQQLLDSKLISERKFNNLTKAERGGLDERDKVGFIKRQLVETRQITKHVARILDARFNTEVSEKNQKIRSVKIITLKSNLVSNFRKEFKLYKVREINDYHHAHDAYLNAVVAKAILKKYPKLEPEFVYGDYQKYDLSKDPKEVEKATEKYFFYSNLLNFFKEEVHYADGTIVKRENIEYSKDTGEIAWNKEKDFVTIKKVLSYPQVNIVKKREVQTGGFSKESILPKGNSDKLIPRKTKDILWDTTKYGGFDSPVIAYSILLIADIEKGKAKKLKTVKTLVGITIMEKAAFEKNPITFLENKGYHNVRKENILCLPKYSLFELENGRRRLLASAKELQKGNEIVLPVYLTTLLYHSKNVHKLDEPEHLEYIQKHRYEFKDLLNLVSEFSQKYVLAEANLEKIKSLYVDNEQADIEILANSFINLLTFTALGAPAAFKFFGKDVDRKRYTTVSEILNATLIHQSITGLYETRIDLSKLGED

SEQ ID NO: 186 - protein, 1359 aa, Streptococcus suis
MKKKYAIGIDIGTNSVGWSVVTDDYKVPSKKMKVFGNTEKRYIKKNLLGTLLFDEGNTAENRRLKRTARRRYTRRRNRILYLQEIFAEEINKIDDSFFQRLDDSFLIVEDKQGSKHPIFGTLQEEKKYHKQFPTIYHLRKQLADSSQKADIRLIYLALAHIIKYRGHFLFEGDLKSENKDVQHLFNDFVEMFDKTVEGSYLSENLPNVADVLVEKVSKSRRLENILHYFPNEKKNGLFGNFLALALGLQPNFKTNFELAEDAKIQFSKETYEEDLEELLGKIGDDYADLFIATKSLYDGILLAGILSTTDSTTKAPLSSSMVNRYEEHKKDLALLKNFIHQNLSDSYKEVFNDKLKDGYAGYIEGKTTQENFYRFIKKAIEKIEGSDYFIDKIDREDFLRKQRTFDNGSIPHQIHLQEMHAIIRRQAEFYPFLVENQDKIEKILTFRIPYYVGPLARGKSEFAWLNRKSDEKIRPWNFDEMVDKETSAENFITRMTNYDQYLPDQKVLPKHSLLYEKFAVYNELTKVKFIAEGMRDYQFLDSGQKKDIVKTLFKTKRKVTAKDIKAYLENSNGYAGVELKGLEEQFNASLPTYHDLLKILRDKAFIDAEENQEILEDIVLTLTLFEDREMIRKRLEKYKDILTEEQRKKLERRHYTGWGRLSAKLINGILDKVTRKTILGYLIDDGTSNRNFMQLINDDTLSFVDEIRLAQGSGEAEDYRAEVQNLAGSPAIKKGILQSLKIVDELIEVMGYDPEHIVVEMARENQFTNQGRRNSQQRYKKIENAIKNLNSKILKEYPTNNQALQNDRLFLYYLQNGKDMYTDEELDIDQLSQYDIDHIIPQAFIKDDSLDNKVLTKSAKNRGKSDDVPSLEIVHKKKNFWKQLLDSQLISQRKFDNLTKAERGGLTNEDKARFIQRQLVETRQITKHVARILDTRFNTKLDEAGNRIRDPKVNIITLKSNLVSQFRKDYQLYKVREINNYHHAHDAYLNAVVATALLKKYPQLAPEFVYGDYPKYNSYKSRKATEKVLFYSNIMNFFRRVLVYSKTGEVRIRPVIEVNKETGEIVWDKKSDFRTVRKVLSYPQVNVVKKVEMQTGGFSKESILQHGDSDKLIPRKTEKFYLDTKKYGGFDSPTIAYSVLLIADIEKGKAKKLKRVKELIGITIMERMAFEKNPIEFLEHKGYKNILEKNIIKLPKYSLFELENGRRRLLASAKELQKGNEMILPPHLVTLLYHSSNIHKITEPIHLNYVNKNKHEFKELLRHISDFSTRYILAQDRLSKIEELYDKNDGDDISDLTSSFVNLLTFTAIGAPAAFKFLGSVIDRKRYTSIAEILEATLIHQSVTGLYETRIDLSKLGGD

SEQ ID NO: 187 - protein, 1361 aa, Streptococcus suis
MKKKYAIGIDIGTNSVGWSVVTDDYKVPSKKMKVFGNTEKRYIKKNLLGTLLFDEGNTAENRRLKRTARRRYTRRRNRILYLQEIFAEEINKIDDSFFQRLDDSFLIVEDKQGSKHPIFGTLQEEKEYHKQFPTIYHLRKQLADSSQKADIRLIYLALAHIIKYRGHFLFEGDLKSENKDVQHLFNDFVEMFDKTVEGSYLSENLPNVADVLVEKVSKSRRLENILHYFPNEKKNGLFGNFLTLALGLQPNFKTNFELAEDAKIQFSKETYEEDLEELLGKIGDDYADLFIATKSLYDGILLAGILSTTDSTTKAPLSSSMVNRYEEHQKDLALLKNFIHQNLSDSYKEVFNDKLKDGYAGYIEGKTTQENFYRFIKKAIEKIEGSNYFIDKIDREDFLRKQRTFDNGSIPHQIHLQEMHAIIRRQAEFYPFLVENQDKIEKILTFRIPYYVGPLARGKSEFAWLNRKSDEKIRPWNFDEMVDKETSAENFITRMTNYDQYLPDQKVLPKHSLLYEKFAVYNELTKVRYVTEQGKSFFFDANMKQEIFDGVFKVYRKVTKEKLMDFLGKEFDEFRIVDLLGLDKDNKSFNASLGTYHDLKKIVSKDLLDNPENEDILENVVLTLTLFEDREMIRKRLEKYKDVLTEEQRKKLERRHYTGWGRLSAKLINGIRDKVTRKTILDYLIDDGTSNRNFMQLINDDTLSFVDEIRLAQGSGEAEDYRAEVQNLAGSPAIKKGILQSLKIVDELIEVMGYDPEHIVVEMARENQFTNQGRRNSQQRYKKIENAIKNLNSKILKEYPTNNQALQNDRLFLYYLQNGKDMYTDEELDIDQLSQYDIDHIIPQAFIKDDSLDNKVLTKSAKNRGKSDDVPSLEIVHKKKNFWKQLLDSQLISQRKFDNLTKAERGGLTNEDKARFIQRQLVETRQITKHVARILDTRFNTKLDEAGNRIRDPKVNIITLKSNLVSQFRKDYQLYKVREINNYHHAHDAYLNAVVATALLKKYPQLAPEFVYGDYPKYNSYKSRKATEKVLFYSNIMNFFRRVLVYSKTGEVRIRPVIEVNKETGEIVWDKKSDFRTVRKVLSYPQVNVVKKVEMQTGGFSKESILQHGDSDKLIPRKTEKFYLDTKKYGGFDSPTIAYSVLLIADIEKGKAKKLKRVKELIGITIMERMAFEKNPIEFLEHKGYKNILEKNIIKLPKYSLFELENGRRRLLASAKELQKGNEMILPPHLVTLLYHSSNIHKITEPIHLNYVNKNKHEFKELLRHISDFSTRYILAQDRLSKIEELYDKNDGDDISDLTSSFVNLLTFTAIGAPAAFKFLGSVIDRKRYTSIAEILEATLIHQSVTGLYETRIDLSKLGGD

SEQ ID NO: 188 - protein, 1361 aa, Streptococcus suis
MKKKYAIGIDIGTNSVGWSVVTDDYKVPSKKMKVFGNTEKRYIKKNLLGTLLFDEGNTAENRRLKRTARRRYTRRRNRILYLQEIFAEEINKIDDSFFQRLDDSFLIVEDKQGSKHPIFGTLQEEKEYHKQFPTIYHLRKQLADSSQKADIRLIYLALAHIIKYRGHFLFEGDLKSENKDVQHLFNDFVEMFDKTVEGSYLSENLPNVADVLVEKVSKSRRLENILHYFPNEKKNGLFGNFLALALGLQPNFKTNFELAEDAKIQFSKETYEEDLEELLGKIGDDYADLFIATKSLYDGILLAGILSTTDSTTKAPLSSSMVNRYEEHQKDLALLKNFIHQNLSDSYKEVFNDKLKDGYAGYIEGKTTQENFYRFIKKAIEKIEGSNYFIDKIDREDFLRKQRTFDNGSIPHQIHLQEMHAIIRRQAEFYPFLVENQDKIEKILTFRIPYYVGPLARGKSEFAWLNRKSDEKIRPWNFDEMVDKETSAENFITRMTNYDQYLPDQKVLPKHSLLYEKFAVYNELTKVRYVTEQGKSFFFDANMKQEIFDGVFKVYRKVTKEKLMDFLGKEFDEFRIVDLLGLDKDNKSFNASLGTYHDLKKIVSKDLLDNPENEDILENVVLTLTLFEDREMIRKRLEKYKDVLTEEQRKKLERRHYTGWGRLSAKLINGIRDKVTRKTILDYLIDDGTSNRNFMQLINDDTLSFVDEIRLAQGSGEAEDYRAEVQNLAGSPAIKKGILQSLKIVDELIEVMGYDPEHIVVEMARENQFTNQGRRNSQQRYKKIENAIKNLNSKILKEYPTNNQALQNDRLFLYYLQNGKDMYTDEELDIDQLSQYDIDHIIPQAFIKDDSLDNKVLTKSAKNRGKSDDVPSLEIVHKKKNFWKQLLDSQLISQRKFDNLTKAERGGLTNEDKARFIQRQLVETRQITKHVARILDTRFNTKLDEAGNRIRDPKVNIITLKSNLVSQFRKDYQLYKVREINNYHHAHDAYLNAVVATALLKKYPQLAPEFVYGDYPKYNSYKSRKATEKVLFYSNIMNFFRRVLVYSKTGEVRIRPVIEVNKETGEIVWDKKSDFRTVRKVLSYPQVNVVKKVEMQTGGFSKESILQHGDSDKLIPRKTEKFYLDTKKYGGFDSPTIAYSVLLIADIEKGKAKKLKRVKELIGITIMERMAFEKNPIEFLEHKGYKNILEKNIIKLPKYSLFELENGRRRLLASAKELQKGNEMILPPHLVTLLYHSSNIHKITEPIHLNYVNKNKHEFKELLRHISDFSTRYILAQDRLSKIEELYDKNDGDDISDLTSSFVNLLTFTAIGAPAAFKFLGSVIDRKRYTSIAEILEATLIHQSVTGLYETRIDLSKLGGD

SEQ ID NO: 189 - protein, 1359 aa, Streptococcus suis
MKKKYAIGIDIGTNSVGWSVVTDDYKVPSKKMKVFGNTEKRYIKKNLLGTLLFDEGNTAENRRLKRTARRRYTRRRNRILYLQEIFAEEINKIDDSFFQRLDDSFLIVEDKQGSKHPIFGTLQEEKKYHKQFPTIYHLRKQLADSSQKADIRLIYLALAHIIKYRGHFLFEGDLKSENKDVQHLFNDFVEMFDKTVEGSYLSENLPNVADVLVEKVSKSRRLENILHYFPNEKKNGLFGNFLALALGLQPNFKTNFELAEDAKIQFSKETYEEDLEELLGKIGDDYADLFIATKSLYDGILLAGILSTTDSTTKAPLSSSMVNRYEEHKKDLALLKNFIHQNLSDSYKEVFNDKLKDGYAGYIEGKTTQENFYRFIKKAIEKIEGSDYFIDKIDREDFLRKQRTFDNGSIPHQIHLQEMHAIIRRQAEFYPFLVENQDKIEKILTFRIPYYVGPLARGKSEFAWLNRKSDEKIRPWNFDEMVDKETSAENFITRMTNYDQYLPDQKVLPKHSLLYEKFAVYNELTKVKFIAEGMRDYQFLDSGQKKDIVKTLFKTKRKVTAKDIKAYLENSNGYAGVELKGLEEQFNASLPTYHDLLKILRDKAFIDAEENQEILEDIVLTLTLFEDREMIRKRLEKYKDILTEEQRKKLERRHYTGWGRLSAKLINGILDKVTRKTILGYLIDDGTSNRNFMQLINDDTLSFVDEIRLAQGSGEAEDYRAEVQNLAGSPAIKKGILQSLKIVDELIEVMGYDPEHIVVEMARENQFTNQGRRNSQQRYKKIENAIKNLNSKILKEYPTNNQALQNDRLFLYYLQNGKDMYTDEELDIDQLSQYDIDHIIPQAFIKDDSLDNKVLTKSAKNRGKSDDVPSLEIVHKKKNFWKQLLDSQLISQRKFDNLTKAERGGLTNEDKARFIQRQLVETRQITKHVARILDTRFNTKLDEAGNRIRDPKVNIITLKSNLVSQFRKDYQLYKVREINNYHHAHDAYLNAVVATALLKKYPQLAPEFVYGDYPKYNSYKSRKATEKVLFYSNIMNFFRRVLVYSKTGEVRIRPVIEVNKETGEIVWDKKSDFKTVRKVLSYPQVNVVKKVEMQTGGFSKESILQHGDSDKLIPRKTEKFYLDTKKYGGFDSPTIAYSVLLIADIEKGKAKKLKRVKELIGITIMERMAFEKNPIEFLEHKGYKNILEKNIIKLPKYSLFELENGRRRLLASAKELQKGNEMILPPHLVTLLYHSSNIHKITEPIHLNYVNKNKHEFKELLRHISDFSTRYILAQDRLSKIEELYDKNDGDDISDLTSSFVNLLTFTAIGAPAAFKFLGSVIDRKRYTSIAEILEATLIHQSVTGLYETRIDLSKLGGD

SEQ ID NO: 190 - protein, 1351 aa, Streptococcus suis
MDQKYSIGLDIGTNSVGWAVVTDDYKVPAKKMKVLGNTDKQSIKKNLLGALLFDSGETAEATRLKRTARRRYTRRRNRLRYLQEIFAEEMNKVDENFFQRLDDSFLVDEDKRGERHPIFGNIAAEVKYHDDFPTIYHLRKHLADISQKADLRLVYLALAHMIKFRGHFLIEGQLKAENTNVQALFKDFVEVYDKTVEESHLSEMTVDALSILTEKVSKSRRLENLIAHYPAEKKNTLFGNLIALSLGLQPNFKTNFQLSEDAKLQFSKDTYEEDLEGLLGEIGDEYADLFASAKNLYDAILLSGILTVDDNSTKAPLSASMVKRYEEHQKDLKKLKDFIKVNAPDQYNAIFKDKNKKGYAGYIENGVKQDEFYKYLKGILLQINGSGDFLDKIDREDFLRKQRTFDNGSIPHQIHLQEMHAILRRQEEHYPFLKENQDKIEKILTFRIPYYVGPLARKGSRFAWAEYKADEKITPWNFDDILDKEKSAEKFITRMTLNDLYLPEEKVLPKHSLLYETFTVYNELTKVKYVNEQGEAKFFDANMKQEIFDHVFKENRKVTKDKLLNYLGKEFDEFRIVDLTGLDKENKVFNSSLGTYHDLRKILDKSFLDNKENEQIIEDIIQTLTLFEDREMIRQRLQKYSDIFTKAQLKKLERCHYTGWGRLSYKLINGIRNKENKKTILDYLIDDGYANRNFMQLINDDALSFKEEIAKAQVIGETDDLNQVVSDIAGSPAIKKGILQSLKIVDELVKVMGYNPANIVIEMARENQTTDKGRRNSQQRLKLLQDSLKPVNIKNVENQQLQNDRLFLYYIQNGKDMYTGETLDINNLSQYDIDHIIPQAFIKDDSFDNRVLTSSSENRGKSDNVPSIEVVRARKADWMRLRKAGLISQRKFDNLTKAERGGLTENDKAGFIKRQLVETRQITKHVAQVLDARFNAKHDENKKVIRDVKIITLKSNLVSQFRKDFKFYKVREINDYHHAHDAYLNAVIGTALLKKYPKLASEFVYGEFKKYDVSDKEIGKATAKYFFYSNLMNFFKKEVKFADGTVVERPDIETSEDGEIAWNKQTDFKIVRKVLSYPQVNIVKKTEVQTHGLDRPSPKPKPDSSENLVGVKRNLDPKKYGGYAGISNSYAVLVKAIIEKGVKKKETMVLEFQGISILDRITFEKDKRAFLLGKGYKDIKKIIELPKYSLFELKDGSRRMLASRGEIHKGNELFVPQKFTTLLYHAKRINNPINKDHIEYVKKHRDDFKELLNYVLEFNEKYVGATKNGERLKEAVADFDSKSNEEICTSFLGLFELTSLGSASDFEFLGVKIPRYRDYTPSSLLKDSTLIHQSITGLYETRIDLSKLGED

SEQ ID NO: 191 - protein, 1256 aa, Brochothrix thermosphacta
MWGVSLFEAGKTAAERRGYRSTRRRLNHRKFRLRLLEDMFEKEILSKDPSFFIRLKEAFLSPKDEQKQFLFNDKDYTDADYYEQYKTIYHLRYDLISQHRQFDIREVYLAIHHLIKYRGHFIYEDQTFTTDGNQLQHHIKAIITMINSTLNRIIPETIDINVFEKILLDRMMNRSSKVKFLIELTGKQDKPLLKELFNLIVGLKAKPASIFEQENLATIVETMNMSTEQVQLDLLTLADVLADEEYDLLLTAQKIYSAIILDESMDGYEYFAEAKKESYRKHQEELVLVKKMLKSNAITNDERAKFEYFYTDYIGYEESKSKEERLFKHIELLLAKENVLTTVEHALLEKNITFASLLPLQRSSRNAVIPYQVHEKELVAILENQATYYPFLLEQKDNIHKLLTFRIPYYVGPLADQKDSEFAWMVRKQAGKITPFNFEEMVDIDASSEAFIKRMTNKCTYLIHEDVIPKHSFSYAKFEVLNELNKIRLDGKPIDIPLKKRIFEGLFLEKTKVTQTSLKKWLAEHEHMTVSVVQGTQKETEFATSLQAFHRFVKIFDRETVSNPANEEMFEKIIYWSTVFEDKKIMRRKLSEYPQLTEQQQVQLAQVRFRGWGRLSQRLINRIKTPEDHKLSINEILQTNENFMQIIRNKDYLFKKIIEEQFENETALLNKQRIDELAASPANKKGIWQAIKIVKELEKVLQQPAENIFIEFARSDEESKRSTPRDKFIEKAYAETDTEHLKELKQRSKQLSSQRLFLYFIQNGKCMYSGEHLDIERLDSYEVDHILPQSYIKDNSIENLALVKKVENQRKKDSLLLNSSIINQNYSRWEQLKNAGLIGEKKFRNLTRTKITDRDKEGFIARQLVETRQITKHVTQLLQQEYKDTTKVFAIKATLVSGLRRKFEFIKNRNVNDYHHAQDAFLVAFLGTNITSNYPKIEMEYLFKGYQHYLNEVGKAAKPKFTFIVENLSKQQNSTTGEVKWNPEVDIAKLKRILNFKQCNIVRKVEEQSGALFKETIYPVEESSSKTIPLKKHLDTAIYGGYTAVNYASYALIQFKKGRKLKREIIGIPLAVQTRIDNSETSLQAYIAEQIKSEVEILNGRILKYQLISNNGNRLYIAGSERHNARQLIVSDEAAKVIWLISTKQADEAMFLKYYRLEHLEAVFEELIRKQAADYQIFEKLIKKIEVNFYSCTYNEKVKVIELLKITQANATNGDLKLLKMSNREGRLGSVSVALDFKIINQSVTGLYQSIEDYNN

SEQ ID NO: 192 - protein, 1290 aa, Catenibacterium mitsuokai
IVDYCIGLDLGTGSVGWAVVDMNHRLMKRNGKHLWGSRLFSNAETAANRRASRSIRRRYNKRRERIRLLRAILQDMVLEKDPTFFIRLEHTSFLDEEDKAKYLGDNYNLFIDEDFNDYTYYHKYPTIYHLRKALCESTEKADPRLIYLALHHIVKYRGNFLYEGQKFNMDASNIEDKLSDIFTQFTSFNNIPYEDDKKNLEILEILKKPLSKKAKVDEVMTLIAPEKDYKSAFKELVTGIAGNKMNVTKMILCEPIKQGDSEIKLKFSDSNYDDQFSEVEKDLGEYVEFVDALHNVYSWVELQTIMGATHTDNASISEAMVSRYNKHHDDLKLLKDCIKNNVPNKYFDMFRNDSEKSKGYYNYINRKAPVDEFYKYVKKCIEKVDTPEAKQILNDIELENFLLKQNSRTNGSVPYQMQLDEMIKIIDNQAEYYPILKEKREQLLSILTFRIPYYFGPLETSEHAWIKRLEGKENQRILPWNYQDIVDVDATAEGFIKRMRSYCTYFPDEEVLPKNSLIVSKYEVYNELNKIRVDDKLLEVDVKNDIYNELFMKNKTVTEKKLKNWLVNNQCCSKDAEIKGFQKENQFSTSLTPWIDFTNIFGKIDQSNFDLIENIIYDLTVFEDKKIMKRRLKKKYALPDDKVKQILKLKYKDWSRLSKKLLDGIVADSVTVLDVLESRLNLMEIINDKDLGYAQMIEEATSCPEDGKFTYEEVERLAGSPALKRGIWQSLQIVEEITKVMKCRPKYIYIEFERSEEKERTESKIKKLENVYKDEQTSVLEELKGFDNTKKISSDSLFLYFTQLGKCMYSGKKLDIDSLDKYQIDHIVPQSLVKDDSFDNRVLVVPSENQRKLDDLVVPFDIRDKMYRFWKLLFDHELISPKKFYSLIKTEYTERDEERFINRQLVETRQITKNVTQIIEDHYSTTKVAAIRANLSHEFRVKNHIYKNRDINDYHHAHDAYIVALIGGFMRDRYPNMHDSKAVYSEYMKMFRNKNDQKGFVINSMNYPYEVDGKLIWNPDLINEIKKCFYYKDCYCTTKLDQKSGQLFNTVLSNDAHADKGAVVPVNKNRSDVHKYGGFSGLQYTIVAIEGQKKKGKKTELVKKISGVPLHLKAASINEKINYIEEKEGLSDVRIIKDNIPVNQMIEMDGGEYLLTSEYVNARQLVLNEKQCALIADIYNAIYKQDYDNLDDILMIQLYIELTNKMKVLYPAYRGIAEKFESYVVISKEEKANIIQMLIVMHRGPQNGNIVYDDFKISDRIGRLKTKNHNLNIVFISQSPTGIYTKKYKL

SEQ ID NO: 193 - protein, 1359 aa, synthetic construct; identical to SEQ ID NO: 11
  REGION 1..1359: note = Synthetic Polypeptide

SEQ ID NO: 194 - protein, 1317 aa, Staphylococcus aureus
MKNYTIGLDIGTNSVGWAVIKDDLTLVRKKIKISGNTDKKEVKKNLWGSFLFEQGDTAQDTRVKRIARRRYERRRFRIRELQKIFDKSMGEVDSNFFHRLDESFLVEEDKEYSKYPIFSNEKEDKNYYDKYPTIYHLRKDLADSNQKADLRLIYLALAHMIKYRGHFLIEGDLKMDGISISESFQEFIDSYNEVCALEDENNDELLTQIENIFKQDISRSKKLDQAIALFQGKRQSLFGIFLTLIVGNKANFQKIFNLEDDIKLDLKEEDYDENLEELLSNIDEGYRDVFLQAKNVYNAIELSKILKTDGKETKAPLSAQMVELYNQHREDLKKYKDYIKAYLPEKYGETFKDATKNGYAGYIDGKTSQEDFYKFVKAQLKGEENGEYFLEAIENENFLRKQRSFYNGVIPYQIHLQELTAVLDQQEKHYSFLKENRDKIISLLTFRIPYYVGPLAKGESRFAWLERSNSEEKIKPWNFDKIVDIDKSAELFIENLTSRDTYLPDEPVLPKRSLIYQKFTIFNELTKISYIDERGILQNFSSREKIAIFNDLFKNKSKVTKNQLVKYIENKEQIIAPEIKGIEDSFNSNYSTYIDLSKIPDMKLLEKDEDEILEEIIKILTIFEDRKMRKRQLMKFKDKLSEKAINQLSKKHYTGWGQLSEKLINGIRDEQSNKTILDYLIDNGCPKNMNRNFMQLINDDTLSFKEKIRKAQDINQVNDIKEIVKDLPGSPAIKKGIYQSIRIVDEIIRKMKDRPKNIVIEMARENQTTQEGKNKSKARLKKIQEGLENLDSHVEKQALDEEMLKSPKYYLYCLQNGKDIYTGKDLDIGQLQTYDIDHIIPRSFITDNSFDNLVLTSSTVNRGKLDNVPSPDIVRQQKGFWKQLLRAGLMSQRKFNNLTKGKLTDRDRQQFINRQLVETRQITKHVANLLSHHLNEKKEVGEINIVLLKSALTSQFRKKFDFYKVREVNDYHHAHDAYLNGVIALKLLELYPYMAKDLIYGKYSYHRKGDKATQAKYKMSNIIERFSQDLLANPDGEIAWEKDKDLNTIRKVLSSKQINIIKKAEEGKGRLFKETINSRPSKKTEKRIPIKNNLDPNIYGGYIEEKMAYYIAINYLENGKTKKAIVGISIKDKKDFEGQTTEYLGKIGFNKASIINSFKNYTLFELENGSRRMIVGKGELQKGNQMYLPQNLLEFVYHLKHYNEDETSHKFIVEHKAYFDELLNYIVEFANKYLELENSIEKIKDLYHGKGPDVEEKELVESFINLLAITKCGPAADITFLGEKISRKRYRSTNCLWGSEVIFQSPTGLYETRLRLE

SEQ ID NO: 195 - protein, 1359 aa, synthetic construct; identical to SEQ ID NO: 11
  REGION 1..1359: note = Synthetic Polypeptide

SEQ ID NO: 196 - protein, 1327 aa, Dolosigranulum pigrum
MQKNYTIGLDIGTNSVGWAVMKDDYTLIRKRMKVLGNTDIKKIKKNFWGVRLFDEGETAKETRLKRGTRRRYQRRRNRLIYLQDIFQQPMLAIDENFFHRLDDSFFVPDDKSYDRHPIFGSLEEEVAYHNTYPTIYHLRKHLADNPEKADLRLVYTALAHIVKYRGHFLIEGELNTENTSISETFEQFLDTYSDIFKEQLVGDISKVEEILSSKQSRSRKHEQIMALFPNENKLGNFGRFMMLIVGNTSNFKPVFDLDDEYKLKLSDETYEEDLDTLLGMTDDVFLDVFMAAKNVYDAVEMSAIISTDTGNSKAVLSNQMINFYDEHKVDLAQLKQFFKTHLPDKYYECFSDPSKNGYAGYIDGKTNQEDFYKYIEKVMKTIKSDKKDYFLDKIDREVFLRKQRSFYNSVIPHQIHLQEMQAILDRQSQYYPFLAENRDKIESLVTFRIPYYVGPLTVSDQSEFAWMERQSDEPIRPWNFDEIVNKERSAEKFIERMTNMDTYLLEEKVLPKRSLLYQTFEVYNELTKVRYTNEQGKTEKLNRQQKAEIIETLFKQKNRVREKDIANYLEQYGYVDGTDIKGVEDKFNASLSTYNDLAKIDGAKAYLDDPEYADVWEDIIKILTIFEDKAMRKKQLQTYSDTLSPEILKKLERKHYTGWGRFSKKLINGLRDEGSNKTILDYLKDEGSSGPTNRNFMQLIRDNTLSFKKKIEDAQTIEDTTHIYDTVAELPGSPAIKKGIRQALKIVEEIIDIIGYEPENIVVEMARESQTTKKGKDLSKERLEKLTEAIKEFDGVKVKDLKNENLRNDRLYLYYLQNGRDMYTNEPLDINNLSKYDIDHIIPQSFTTDNSIDNKVLVSRTKNQGNKSDDVPSINIVHKMKPFWRQLHKAGLISDRKFKNLTKAEHGGLTEADRAHFLNRQLVETRQITKHVANLLDSQYNTAEEQRINIVLLKSSMTSRFRKEFKLYKVREINDYHHGHDAYLNAVVATTIMKVYPNLKPQFVYGQYKKTSMFKEEKATARKHFYSNITKFFKKEKVVNEETGEILWDTERHLSTIKRVLSWKQMNIVKKVEKQKGQLWKETIYPKGDSSKLIPVKEGMDPQKYGGLSQVSEAFAVVITHEKGKKKQLKSDLISIPIVDQKAYEQHPTAYLEEAGYNNPTVLHELFKYQLFELEDGSRRMIASAKEFQKGNQMVLPLELVELLYHANRYDKVKFPDSIEYVHDNLAKFDDLLEYVIDFSNKYINADKNVQKIQKIYKEHGTEDVELTVESFVNLMTFTAMGAPATFKFYGESITRSRYTSITEFRGSTLIFQSITGLYETRYKLED

SEQ ID NO: 197 - protein, 1329 aa, synthetic construct
  REGION 1..1329: note = Synthetic Polypeptide
MKKDYVIGLDIGTNSVGWAVMTEDYQLVKKKMPIYGNTEKKKIKKNFWGVRLFEEGHTAEDRRLKRTARRRISRRRNRLRYLQAFFEEAMTDLDENFFARLQESFLVPEDKKWHRHPIFAKLEDEVAYHETYPTIYHLRKKLADSSEQADLRLIYLALAHIVKYRGHFLIEGKLSTENISVKEQFQQFMIIYNQTFVNGESPLPESVLIEEELTEKASRTKKSEKVLQQFPQEKANGLFGQFLKLMVGNKADFKKVFGLEEEAKITYASESYEEDLEGILAKVGDEYSDVFLAAKNVYDAVELSTILADSDKKSHAKLSSSMIVRFTEHQEDLKKFKRFIRENCPDEYDNLFKNEQKDGYAGYIAHAVSQLKFYQYVKKIIQDIAGAEYFLEKIAQENFLRKQRTFDNGVIPHQIHLAELQAIIHRQAAYYPFLKENQEKIEQLVTFRIPYYVGPLSKGDASTFAWLKRQSEEPIRPWNLQETVDLDQSATAFIERMTNFDTYLPSEKVLPKHSLLYEKFMVFNELTKISYTDDRGIKANFSGKEKEKIFDYLFKTRRKVKKKDIIQFYRNEYNTEIVTLSGLEEDQFNASFSTYQDLLKCGLTRAELDHPDNAEKLEDIIKILTIFEDRQRIRTQLSTFKGQFSAEVLKKLERKHYTGWGRLSKKLINGIYDKESGKTILGYLIDDGVSKHYNRNFMQLINDSQLSFKNAIQKAQSSEHEETLSETVNELAGSPAIKKGIYQSLKIVDELVAIMGYAPKRIVVEMARENQTTSTGKRRSIQRLKIVEKAMAEIGSNLLKEQPTTNEQLRDTRLFLYYMQNGKDMYTGDELSLHRLSHYDIDHIIPQSFMKDDSLDNLVLVGSTENRGKSDDVPSKEVVKDMKAYWEKLYAAGLISQRKFQRLTKGEQGGLTLEDKAHFIQRQLVETRQITKNVAGILDQRYNANSKEKKVQIITLKASLTSQFRSIFGLYKVREVNDYHHGQDAYLNCVVATTLLKVYPNLAPEFVYGEYPKFQTFKENKATAKAIIYTNLLRFFTEDEPRFTKDGEILWSNSYLKTIKKELNYHQMNIVKKVEVQKGGFSKESIKPKGPSNKLIPVKNGLDPQKYGGFDSPIVAYTVLFTHEKGKKPLIKQEILGITIMEKTRFEQNPILFLEEKGFLRPRVLMKLPKYTLYEFPEGRRRLLASAKEAQKGNQMVLPEHLLTLLYHAKQCLLPNQSESLAYVEQHQPEFQEILERVVDFAEVHTLAKSKVQQIVKLFEANQTADVKEIAASFIQLMQFNAMGAPSTFKFFQKDIERARYTSIKEIFDATIIYQSTTGLYETRRKVVD

SEQ ID NO: 198 - protein, 1280 aa, synthetic construct
  REGION 1..1280: note = Synthetic Polypeptide
MRLFEEGHTAEDRRLKRTARRRISRRRNRLRYLQAFFEEAMTDLDENFFARLQESFLVPEDKKWHRHPIFAKLEDEVAYHETYPTIYHLRKKLADSSEQADLRLIYLALAHIVKYRGHFLIEGKLSTENTSVKDQFQQFMVIYNQTFVNGESPLPESVLIEEELTEKASRTKKSEKVLQQFPQEKANGLFGQFLKLMVGNKADFKKVFGLEEEAKITYASESYEEDLEGILAKVGDEYSDVFLAAKNVYDAVELSTILADSDKKSHAKLSSSMIVRFTEHQEDLKKFKRFIRENCPDEYDNLFKNEQKDGYAGYIAHAVSQLKFYQYVKKIIQDIAGAEYFLEKIAQENFLRKQRTFDNGVIPHQIHLAELQAIIHRQAAYYPFLKENQEKIEQLVTFRIPYYVGPLSKGDASTFAWLKRQSEEPIRPWNLQETVDLDQSATAFIERMTNFDTYLPSEKVLPKHSLLYEKFMVFNELTKISYTDDRGIKANFSGKEKEKIFDYLFKTRRKVKKKDIIQFYRNEYNTEIVTLSGLEEDQFNASFSTYQDLLKCGLTRAELDHPDNAEKLEDIIKILTIFEDRQRIRTQLSTFKGQFSAEVLKKLERKHYTGWGRLSKKLINGIYDKESGKTILDYLVDDGVSKHYNRNFMQLINDSQLSFKNAIQKAQSSEHEETLSETVNELAGSPAIKKGIYQSLKIVDELVAIMGYAPKRIVVEMARENQTTSTGKRRSIQRLKIVEKAMAEIGSNLLKEQPTTNEQLRDTRLFLYYMQNGKDMYTGDELSLHRLSHYDIDHIIPQSFMKDDSLDNLVLVGSTENRGKSDDVPSKEVVKDMKAYWEKLYAAGLISQRKFQRLTKGEQGGLTLEDKAHFIQRQLVETRQITKNVAGILDQRYNAKSKEKKVQIITLKASLTSQFRSIFGLYKVREVNDYHHGQDAYLNCVVATTLLKVYPNLAPEFVYGEYPKFQTFKENKATAKAIIYTNLLRFFTEDEPRFTKDGEILWSNSYLKTIKKELNYHQMNIVKKVEVQKGGFSKESIKPKGPSNKLIPVKNGLDPQKYGGFDSPVVAYTVLFTHEKGKKPLIKQEILGITIMEKTRFEQNPILFLEEKGFLRPRVLMKLPKYTLYEFPEGRRRLLASAKEAQKGNQMVLPEHLLTLLYHAKQCLLPNQSESLAYVEQHQPEFQEILERVVDFAEVHTLAKSKVQQIVKLFEANQTADVKEIAASFIQLMQFNAMGAPSTFKFFQKDIERARYTSIKEIFDATIIYQSPTGLYETRRKVVD

SEQ ID NO: 199 - protein, 1072 aa, Enterococcus durans
MDEEAKIQLSKESYEEELESLLEKSGEEFRDVFLQAKKVYDAILLSDILSTKKQNSKAKLSLGMIERYDSHKKDLEELKQFVKANLPEKTAIFFKDSSKNGYAGYIDGKTTQEDFYKFLKKELNGIAGSERFMEKVDQENFLLKQRTTANGVIPHQVHLTELKAIIERQKPYYPSLEEARDKMIRLLTFRIPYYVGPLAQGEETSSFAWLERKTPEKVTPWNATEVIDYSASAMKFIQRMINYDTYLPTEKVLPKHSILYQKYTIFNELTKVAYKDERGIKHQFSSKEKREIFKELFQKQRKVTVKKLQQFLSANYNIEDAEILGVDKAFNSSYATYHDFLDLAKPNELLEQPEMNAMFEDIVKILTIFEDREMIRTQLKKYQSVLGDGFFKKLVKKHYTGWGRLSERLINGIRDKKTNKTILDYLIDDDFPYNRNRNFMQLINDDSLSFKEELANELALAGNQSLLEVVEALLGSPAIKKGIWQTLKIVEELIEIIGYNPKNIVVEMARENQRTNRSKPRLKALEEALKSFDSPLLKEQPVDNQALQKDRLYLYYLQNGKDMYTGEALDIDRLSEYDIDHIIPRSFIVDNSIDNKVLVSSKENRLKMDDVPDQKVVIRMRRYWEKLLRANLISERKFAYLTKLELTPEDKARFIQRQLVETRQITKHVAAILDQYFNQPEESKNKGIRIITLKSSLVSQFRKTFGINKVREINNHHHAHDAYLNGVVAIALLKKYPKLEPEFVYGNYTKFNLATENKATAKKEFYSNILRFFEKEEYSYDENGEIFWDKARHIPQIKKVISSHQVNIVKKVEVQTGGFYKETVNPKGKPDKLIQRKAGWDVSKYGGFGSPVVAYAVAFIYEKGKARKKAKAIEGITIMKQSLFEQDPIGFLSNKGYSNVTKFIKLSKYTLYELENGRRRMVASKEAQKANSFILPEKLVTLLYHAQHYDEIAHKESFDYVNDHLSEFREILDQVIDFSNRYTIAAKNTEKIAELFEQNQESTVQSLSQSFINLMQLNAMGAPADFKFFDVIIPRKRYPSLTEIWESTIIYQSITGLRETRTRMATLWDGEQ

SEQ ID NO: 200 - protein, 1329 aa, Enterococcus faecalis
MKKDYVIGLDIGTNSVGWAVMTEDYQLVKKKMPIYGNTEKKKIKKNFWGVRLFEEGHTAEDRRLKRTARRRISRRRNRLRYLQAFFEEAMTDLDENFFARLQESFLVPEDKKWHRHPIFAKLEDEVAYHETYPTIYHLRKKLADSSEQADLRLIYLALAHIVKYRGHFLIEGKLSTENTSVKEQFQQFMVIYNQTFVNGESPLPESVLIEEELTEKASRTKKSEKVLQQFPQEKANGLFGQFLKLMVGNKADFKKVFGLEEEAKITYASESYEEDLEGILAKVGDEYSDVFLAAKNVYDAVELSTILADSDKKSHAKLSSSMIVRFTEHQEDLKKFKRFIRENCPDEYDNLFKNEQKDGYAGYIAHAVSQLKFYQYVKKIIQDIAGAEYFLEKIAQENFLRKQRTFDNGVIPHQIHLAELQAIIHRQAAYYPFLKENQEKIEQLVTFRIPYYVGPLSKGDASTFAWLKRQSEEPIRPWNLQETVDLDQSATAFIERMTNFDTYLPSEKVLPKHSLLYEKFMVFNELTKISYTDDRGIKANFSGKEKEKIFDYLFKTRRKVKKKDIIQFYRNEYNTEIVTLSGLEEDQFNASFSTYQDLLKCGLTRAELDHPDNAEKLEDIIKILTIFEDRQRIRTQLSTFKGQFSAEVLKKLERKHYTGWGRLSKKLINGIYDKESGKTILDYLVDDGVSKHYNRNFMQLINDSQLSFKNAIQKAQSSEHEETLSETVNELAGSPAIKKGIYQSLKIVDELVAIMGYAPKRIVVEMARENQTTSTGKRRSIQRLKIVEKAMAEIGSNLLKEQPTTNEQLRDTRLFLYYMQNGKDMYTGDELSLHRLSHYDIDHIIPQSFMKDDSLDNLVLVGSTENRGKSDDVPSKKVVKKMKAYWEKLYAAGLISQRKFQRLTKGEQGGLTLEDKAHFIQRQLVETRQITKNVAGILDQRYNAKSKEKKVQIITLKASLTSQFRSIFGLYKVREVNDYHHGQDAYLNCVVATTLLKVYPNLAPEFVYGEYPKFQAFKENKATAKTIIYTNLMRFFTEDEPRFTKDSEILWSNSYLKTIKKELNYHQMNIVKKVEVQKGGFSKESIKPKGPSNKLIPVKNGLDPQKYGGFDSPVVAYTVLFTHEKGKKPLIKQEILGITIMEKTRFEQNPILFLEEKGFLRPRVLMKLPKYTLYEFPEGRRRLLASAKEAQKGNQMVLPEHLLTLLYHAKQCLLPNQSESLAYVEQHQPEFQEILERVVDFAEVHTLAKSKVQQIVKLFEANQTADVKEIAASFIQLMQFNAMGAPSTFKFFQKDIERARYTSIKEIFDATIIYQSTTGLYETRRKVVD

SEQ ID NO: 201 - protein, 1329 aa, Enterococcus faecalis
MKKDYVIGLDIGTNSVGWAVMTEDYQLVKKKMPIYGNTEKKKIKKNFWGVRLFEEGHTAEDRRLKRTARRRISRRRNRLRYLQAFFEEAMTALDENFFARLQESFLVPEDKKWHRHPIFAKLEDEVAYHETYPTIYHLRKKLADSSEQADLRLIYLALAHIVKYRGHFLIEGKLSTENISVKEQFQQFMIIYNQTFVNGESPLPESVLIEEELTEKASRTKKSEKVLQQFPQEKANGLFGQFLKLMVGNKADFKKVFGLEEEAKITYASESYEEDLEGILAKVGDEYSDVFLAAKNVYDAVELSTILADSDKKSHAKLSSSMIVRFTEHQEDLKNFKRFIRENCPDEYDNLFKNEQKDGYAGYITHAVSQLKFYQYVKKIIQDIAGAEYFLEKIAQENFLRKQRTFDNGVIPHQIHLAELQAIIHRQAAYYPFLKENQEKIEQLVTFRIPYYVGPLSKGDANTFAWLKRQSEEPIRPWNLQETVDLDQSATAFIERMTNFDTYLPSEKVLPKHSLLYEKFMVFNELTKISYTDDRGIKANFSGKEKEKIFDYLFKTRRKVKKKDIIQFYRNEYNTEIVTLSGLEEDQFNASFSTYQDLLKCGLTRAELDHPDNAEKLEDIIKILTIFEDRQRIRTQLSTFKGQFSAEVLKKLERKHYTGWGRLSKKLINGIYDKESGKTILDYLIDDGVSKHYNRNFMQLINDSQLSFKNAIQKAQSSEHEETLSETVNELAGSPAIKKGIYQSLKIVDELVAIMGYAPKRIVVEMARENQTTSTGKRRSIQRLKIVEKAMAEIGSNLLKEQPTTNEQLRDTRLFLYYMQNGKDMYTGDELSLHRLSHYDIDHIIPQSFMKDDSLDNLVLVGSTENRGKSDDVPSKEVVKDMKAYWEKLYAAGLISQRKFQRLTKGEQGGLTLEDKAHFIQRQLVETRQITKNVAGILDQRYNAKSKEKKVQIITLKASLTSQFRSIFGLYKVREVNDYHHGQDAYLNCVVATTLLKVYPNLAPEFVYGEYPKFQTFKENKATAKAIIYTNLLRFFTEDEPRFTKDGEILWSNSYLKTIKKELNYHQMNIVKKVEVQKGGFSKESIKPKGPSNKLIPVKNGLDPQKYGGFDSPIVAYTVLFTHEKGKKPLIKQEILGITIMEKTRFEQNPILFLEEKGFLRPRVLMKLPKYTLYQFPEGRRRLLASAKEAQKGNQMVLPEHLLTLLYHAKQCLLPNQSESLAYVEQHQPEFQEILERVVDFAEVHTLAKSKVQQIVKLFEANQTADVKEIAASFIQLMQFNAMGAPSTFKFFQKDIERARYTSIKEIFDATIIYQSTTGLYETRRKVVD

SEQ ID NO: 202 - protein, 1329 aa, Enterococcus faecalis
MKKDYVIGLDIGTNSVGWAVMTEDYQLVKKKMPIYGNTEKKKIKKNFWGVRLFEEGHTAEDRRLKRTARRRISRRRNRLRYLQAFFEEAMTALDENFFARLQESFLVPEDKKWHRHPIFAKLEDEVAYHETYPTIYHLRKKLADSSEQADLRLIYLALAHIVKYRGHFLIEGKLSTENISVKEQFQQFMIIYNQTFVNGESPLPESVLIEEELTEKASRTKKSEKVLQQFPQEKANGLFGQFLKLMVGNKADFKKVFGLEEEAKITYASESYEEDLEGILAKVGDEYSDVFLAAKNVYDAVELSTILADSDKKSHAKLSSSMIVRFTEHQEDLKNFKRFIRENCPDEYDNLFKNEQKDGYAGYITHAVSQLKFYQYVKKIIQDIAGAEYFLEKIAQENFLRKQRTFDNGVIPHQIHLAELQAIIHRQAAYYPFLKENQEKIEQLVTFRIPYYVGPLSKGDASTFAWLKRQSEEPIRPWNLQETVDLDQSATAFIERMTNFDTYLPSEKVLPKHSLLYEKFMVFNELTKISYTDDRGIKANFSGKEKEKIFDYLFKTRRKVKKKDIIQFYRNEYNTEIVTLSGLEEDQFNASFSTYQDLLKCGLTRAELDHPDNAEKLEDIIKILTIFEDRQRIRTQLSTFKGQFSAEVLKKLERKHYTGWGRLSKKLINGIYDKESGKTILDYLVDDGVSKHYNRNFMQLINDSQLSFKNAIQKAQSSEHEETLSETVNELAGSPAIKKGIYQSLKIVDELVAIMGYAPKRIVVEMARENQTTSTGKRRSIQRLKIVEKAMAEIGSNLLKEQPTTNEQLRDTRLFLYYMQNGKDMYTGDELSLHRLSHYDIDHIIPQSFMKDDSLDNLVLVGSTENRGKSDDVPSKEVVKDMKAYWEKLYAAGLISQRKFQRLTKGEQGGLTLEDKAHFIQRQLVETRQITKNVAGILDQRYNAKSKEKKVQIITLKASLTSQFRSIFGLYKVREVNDYHHGQDAYLNCVVATTLLKVYPNLAPEFVYGEYPKFQTFKENKATAKAIIYTNLLRFFTEDEPRFTKDGEILWSNSYLKTIKKELNYHQMNIVKKVEVQKGGFSKESIKPKGPSNKLIPVKNGLDPQKYGGFDSPIVAYTVLFTHEKGKKPLIKQEILGITIMEKTRFEQNPILFLEEKGFLRPRVLMKLPKYTLYEFPEGRRRLLASAKEAQKGNQMVLPEHLLTLLYHAKQCLLPNQSESLAYVEQHQPEFQEILERVVDFAEVHTLAKSKVQQIVKLFEANQTADVKEIAASFIQLMQFNAMGAPSTFKFFQKDIERARYTSIKEIFDATIIYQSTTGLYETRRKVVD

SEQ ID NO: 203 - protein, 1329 aa, Enterococcus faecalis
MKKDYVIGLDIGTNSVGWAVMTEDYQLVKKKMPIYGNTEKKKIKKNFWGVRLFEEGHTAEDRRLKRTARRRISRRRNRLRYLQAFFEEAMTDLDENFFARLQESFLVPEDKKWHRHPIFAKLEDEVAYHETYPTIYHLRKKLADSSEQADLRLIYLALAHIVKYRGHFLIEGKLSTENISVKEQFQQFMIIYNQTFVNGESPLPESVLIEEELTEKASRTKKSEKVLQQFPQEKANGLFGQFLKLMVGNKADFKKVFGLEEEAKITYASESYEEDLEGILAKVGDEYSDVFLAAKNVYDAVELSTILADSDKKSHAKLSSSMIVRFTEHQEDLKKFKRFIRENCPDEYDNLFKNEQKDGYAGYIAHAVSQLKFYQYVKKIIQDIAGAEYFLEKIAQENFLRKQRTFDNGVIPHQIHLAELQAIIHRQAAYYPFLKENQEKIEQLVTFRIPYYVGPLSKGDASTFAWLKRQSEEPIRPWNLQETVDLDQSATAFIERMTNFDTYLPSEKVLPKHSLLYEKFMVFNELTKISYTDDRGIKANFSGKEKEKIFDYLFKTRRKVKKKDIIQFYRNEYNTEIVTLSGLEEDQFNASFSTYQDLLKCGLTRAELDHPDNAEKLEDIIKILTIFEDRQRIRTQLSTFKGQFSAEVLKKLERKHYTGWGRLSKKLINGIYDKESGKTILDYLVDDGVSKHYNRNFMQLINDSQLSFKNAIQKAQSSEHEETLSETVNELAGSPAIKKGIYQSLKIVDELVAIMGYAPKRIVVEMARENQTTSTGKRRSIQRLKIVEKAMAEIGSNLLKEQPTTNEQLRDTRLFLYYMQNGKDMYTGDELSLHRLSHYDIDHIIPQSFMKDDSLDNLVLVGSTENRGKSDDVPSKEVVKDMKAYWEKLYAAGLISQRKFQRLTKGEQGGLTLEDKAHFIQRQLVETRQITKNVAGILNQRYNANSKEKKVQIITLKASLTSQFRSIFGLYKVREVNDYHHGQDAYLNCVVATTLLKVYPNLAPEFVYGEYPKFQTFKENKATAKAIIYTNLLRFFTEDEPRFTKDGEILWSNSYLKTIKKELNYHQMNIVKKVEVQKGGFSKESIKPKGPSNKLIPVKNGLDPQKYGGFDSPVVAYTVLFTHEKGKKPLIKQEILGITIMEKTRFEQNPILFLEEKGFLRPRVLMKLPKYTLYEFPEGRRRLLASAKEAQKGNQMVLPEHLLTLLYHAKQCLLPNQSESLAYVEQHQPEFQEILERVVDFAEVHTLAKSKVQQIVKLFEANQTADVKEIAASFIQLMQFNAMGAPSTFKFFQKDIERARYTSIKEIFDATIIYQSTTGLYETRRKVVD

SEQ ID NO: 204 - protein, 1331 aa, Enterococcus faecalis
MKKDYVIGLDIGTNSVGWAVMTEDYQLVKKKMPIYGNTEKKKIKKNFWGVRLFEEGHTAEDRRLKRTARRRISRRRNRLRYLQAFFEEAMTALDENFFARLQESFLVPEDKKWHRHPIFAKLEDEVAYHETYPTIYHLRKKLADSSEQADLRLIYLALAHIVKYRGHFLIEGKLSTENISVKEQFQQFMIIYNQTFVNGESPLPESVLIEEELTEKASRTKKSEKVLQQFPQEKANGLFGQFLKLMVGNKADFKKVFGLEEEAKIKITYASESYEEDLEGILAKVGDEYSDVFLAAKNVYDAVELSTILADSDKKSHAKLSSSMIVRFTEHQEDLKNFKRFIRENCPDEYDNLFKNEQKDGYAGYIAHAVSQLKFYQYVKKIIQDIAGAEYFLEKIAQENFLRKQRTFDNGVIPHQIHLAELQAIIHRQAAYYPFLKENQKKIEQLVTFRIPYYVGPLSKGDASTFAWLKRQSEEPIRPWNLQETVDLDQSATAFIERMTNFDTYLPSEKVLPKHSLLYEKFMVFNELTKISYTDDRGIKANFSGKEKEKIFDYLFKTRRKVKKKDIIQFYRNEYNTEIVTLSGLEEDQFNASFSTYQDLLKCGLTRAELDHPDNAEKLEDIIKILTIFEDRQRIRTQLSTFKGQFSEEVLKKLERKHYTGWGRLSKKLINGIYDKESGKTILDYLIDDGVSKHYNRNFMQLINDSQLSFKNAIQKAQSSEHEETLSETVNELAGSPAIKKGIYQSLKIVDELVAIMGYAPKRIVVEMARENQTTSTGKRRSIQRLKIVEKAMAEIGSNLLKEQPTTNEQLRDTRLFLYYMQNGKDMYTGDELSLHRLSHYDIDHIIPQSFMKDDSLDNLVLVGSTENRGKSDDVPSKEVVKKMKAYWEKLYAAGLISQRKFQRLTKGEQGGLTLEDKAHFIQRQLVETRQITKNVAGILDQRYNAKSKEKKVQIITLKASLTSQFRSIFGLYKVREVNDYHHGQDAYLNCVVATTLLKVYPNLAPEFVYGEYPKFQAFKENKATAKAIIYTNLLRFFTEDEPRFTKDGEILWSNSYLKTIKKELNYHQMNIVKKVEVQKGGFSKESIKPKGPSNKLIPVKNGLDPQKYGGFDSPVVAYTVLFTHEKGKKPLIKQEILGITIMEKTRFEQNPILFLEEKGFLRPRVLMKLPKYTLYEFPEGRRRLLASAKEAQKGNQMVLPEHLLTLLYHAKQCLLPNQSESLAYVEQHQPEFQEILERVVDFAEVHTLAKSKVQQIVKLFEANQTADVKEIAASFIQLMQFNAMGAPSTFKFFQKDIERARYTSIKEIFDATIIYQSTTGLYETRRKVVD

SEQ ID NO: 205 - protein, 1329 aa, Enterococcus faecalis
MKKDYVIGLDIGTNSVGWAVMTEDYQLVKKKMPIYGNTEKKKIKKNFWGVRLFEEGHTAEDRRLKRTARRRISRRRNRLRYLQAFFEEAMTALDENFFARLQESFLVPEDKKWHRHPIFAKLEDEVAYHETYPTIYHLRKKLADSSEQADLRLIYLALAHIVKYRGHFLIEGKLSTENISVKEQFQQFMIIYNQTFVNGESPLPESVLIEEELTEKASRTKKSEKVLQQFPQEKANGLFGQFLKLMVGNKADFKKVFGLEEEAKITYASESYEEDLEGILAKVGDEYSDVFLAAKNVYDAVELSTILADSDKKSHAKLSSSMIVRFTEHQEDLKKFKRFIRENCPDEYDNLFKNEQKDGYAGYIAHAVSQLKFYQYVKKIIQDIAGAEYFLEKIAQENFLRKQRTFDNGVIPHQIHLAELQAIIHRQAAYYPFLKENQEKIEQLVTFRIPYYVGPLSKGDASTFAWLKRQSEEPIRPWNLQETVDLDQSATAFIERMTNFDTYLPSEKVLPKHSLLYEKFMVFNELTKISYTDDRGIKANFSGKEKEKIFDYLFKTRRKVKKKDIIQFYRNEYNTEIVTLSGLEEDQFNASFSTYQDLLKCGLTRAELDHPDNAEKLEDIIKILTIFEDRQRIRTQLSTFKGQFSAEVLKKLERKHYTGWGRLSKKLINGIYDKESGKTILGYLIDDGVSKHYNRNFMQLINDSQLSFKNAIQKAQSSEHEETLSETVNELAGSPAIKKGIYQSLKIVDELVAIMGYAPKRIVVEMARENQTTSTGKRRSIQRLKIVEKAMAEIGSNLLKEQPTTNEQLRDTRLFLYYMQNGKDMYTGDELSLHRLSHYDIDHIIPQSFMKDDSLDNLVLVGSTENRGKSDDVPSKEVVKDMKAYWEKLYAAGLISQRKFQRLTKGEQGGLTLEDKAHFIQRQLVETRQITKNVAGILDQRYNAKSKEKKVQIITLKASLTSQFRSIFGLYKVREVNDYHHGQDAYLNCVVATTLLKVYPNLAPEFVYGEYPKFQTFKENKATAKAIIYTNLLRFFTEDEPRFTKDGEILWSNSYLKTIKKELNYHQMNIVKKVEVQKGGFSKESIKPKGPSNKLIPVKNGLDPQKYGGFDSPIVAYTVLFTHEKGKKPLIKQEILGITIMEKTRFEQNPILFLEEKGFLRPRVLMKLPKYTLYEFPEGRRRLLASAKEAQKGNQMVLPEHLLTLLYHAKQCLLPNQSESLAYVEQHQPEFQEILERVVDFAEVHTLAKSKVQQIVKLFEANQTADVKEIAASFIQLMQFNAMGAPSTFKFFQKDIERARYTSIKEIFDATIIYQSTTGLYETRRKVVD

SEQ ID NO: 206 - protein, 1329 aa, Enterococcus faecalis
MKKDYVIGLDIGSNSVGWAVMTEDYQLVKKKMPIYGNTEKKKIKKNFWGVRLFEEGHTAEDRRLKRTARRRISRRRNRLRYLQAFFEEAMTDLDENFFARLQESFLVPEDKKWHRHPIFAKLEDEVAYHETYPTIYHLRKKLADSSEQADLRLIYLALAHIVKYRGHFLIEGKLSTENTSVKDQFQQFMVIYNQTFVNGESPLPESVLIEEELTEKASRTKKSEKVLQQFPQEKANGLFGQFLKLMVGNKADFKKVFGLEEEAKITYASESYEEDLEGILAKVGDEYSDVFLAAKNVYDAVELSTILADSDKKSHAKLSSSMIVRFTEHQEDLKNFKRFIRENCPDEYDNLFKNEQKDGYAGYITHAVSQLKFYQYVKKIIQDIAGAEYFLEKIAQENFLRKQRTFDNGVIPHQIHLAELQAIIHRQAAYYPFLKENQEKIEQLVTFRIPYYVGPLSKGDASTFAWLKRQSEEPIRPWNLQETVDLDQSATAFIERMTNFDTYLPSEKVLPKHSLLYEKFMVFNELTKISYTDDRGIKANFSGKEKEKIFDYLFKTRRKVKKKDIIQFYRNEYNTEIVTLSGLEEDQFNASFSTYQDLLKCGLTRAELDHPDNAEKLEDIIKILTIFEDRQRIRTQLSTFKGQFSAEVLKKLERKHYTGWGRLSKKLINGIYDKESGKTILDYLIDDGVSKHYNRNFMQLINDSQLSFKNAIQKAQSSEHEETLSETVNELAGSPAIKKGIYQSLKIVDELVAIMGYAPKRIVVEMARENQTTSTGKRRSIQRLKIVEKAMAEIGSNLLKEQPTTNEQLRDTRLFLYYMQNGKDMYTGDELSLHRLSHYDIDHIIPQSFMKDDSLDNLVLVGSTENRGKSDDVPSKEVVKDMKAYWEKLYAAGLISQRKFQRLTKGEQGGLTLEDKAHFIQRQLVETRQITKNVAGILDQLYNAKSKEKKVQIITLKASLTSQFRSIFGLYKVREVNDYHHGQDAYLNCVVATTLLKVYPNLAPEFVYGEYPKFQTFKENKATAKTIIYTNLMRFFTEDEPRFTKDGEILWSNSYLKTIKKELNYHQMNIVKKVEVQKGGFSKESIKPKGPSNKLIPVKNGLDPQKYGGFDSPVVAYTVLFTHEKGKKPLIKQEILGITIMEKTRFEQNPILFLEEKGFLRPRVLMKLPKYTLYEFPEGRRRLLASAKEAQKGNQMVLPEHLLTLLYHAKQCLLPNQSESLAYVEQHQPEFQEILERVVDFAEVHTLAKSKVQQIVKLFEANQTADVKEIAASFIQLMQFNAMGAPSTFKFFQKDIERARYTSIKEIFDATIIYQSTTGLYETRRKVVD

SEQ ID NO: 207 - protein, 1329 aa, Enterococcus faecalis
MKKDYVIGLDIGTNSVGWAVMTEDYQLVKKKMPIYGNTEKKKIKKNFWGVRLFEEGHTAEDRRLKRTARRRISRRRNRLRYLQAFFEEAMTALDENFFARLQESFLVPEDKKWHRHPIFAKLEDEVAYHETYPTIYHLRKKLADSSEQADLRLIYLALAHIVKYRGHFLIEGKLSTENISVKEKFQQFMIIYNQTFVNGEGPLPESVLIEEELTEKASRTKKSEKVLQQFPQEKANGLFGQFLKLMVGNKADFKKVFGLEEEAKITYASESYEEDLEGILAKVGDEYSDVFLAAKNVYDAVELSTILADSDKKSYAKLSSSMIVRFTEHQEDLKKFKRFIRENCPDEYDNLFKNEQKDGYAGYIAHAVSQLKFYQYVKKIIQDIAGAEYFLEKIAQENFLRKQRTFDNGVIPHQIHLAELQAIIHRQAAYYPFLKENQEKIEQLVTFRIPYYVGPLSKGDASTFAWLKRQSEEPIRPWNLQETVDLDQSATAFIERMTNFDTYLPSEKVLPKHSLLYEKFMVFNELTKISYTDDRGIKANFSGKEKEKIFDYLFKTRRKVKKKDIIQFYRNEYNTEIVTLSGLEEDQFNASFSTYQDLLKCGLTRAELDHPDNAEKLEDIIKILTIFEDRQRIRTQLSTFKGQFSAEVLKKLERKHYTGWGRLSKKLINGIYDKESGKTILDYLVDDGVSKHYNRNFMQLINDSQLSFKNAIQKAQSSEHEETLSETVNELAGSPAIKKGIYQSLKIVDELVAIMGYAPKRIVVEMARENQTTSTGKRRSIQRLKIVEKAMAEIGSNLLKEQPTTNEQLRDTRLFLYYMQNGKDMYTGDELSLHRLSHYDIDHIIPQSFMKDDSLDNLVLVGSTENRGKSDDVPSKEVVKDMKAYWEKLYAAGLISQRKFQRLTKGEQGGLTLEDKAHFIQRQLVETRQITKNVAGILDQRYNAKSKEKKVQIITLKASLTSQFRSIFGLYKVREVNDYHHGQDAYLNCVVATTLLKVYPNLAPEFVYGEYPKFQTFKENKATAKAIIYTNLLRFFTEDEPRFTKDGEILWSNSYLKTIKKELNYHQMNIVKKVEVQKGGFSKESIKPKGPSNKLIPVKNGLDPQKYGGFDSPIVAYTVLFTHEKGKKPLIKQEILGITIMEKTRFEQNPILFLEEKGFLRPRVLMKLPKYTLYEFPEGRRRLLASAKEAQKGNQMVLPEHLLTLLYHAKQCLLPNQSESLAYVEQHQPEFQEILERVVDFAEVHTLAKSKVQQIVKLFEANQTADVKEIAASFIQLMQFNAMGAPSTFKFFQKDIERARYTSIKEIFDATIIYQSTTGLYETRRKVVD

SEQ ID NO: 208 - protein, 1329 aa, Enterococcus faecalis
MKKDYVIGLDIGTNSVGWAVMTEDYQLVKKKMPIYGNTEKKKIKKNFWGVRLFEEGHTAEDRRLKRTARRRISRRRNRLRYLQAFFEEAMTALDENFFARLQESFLVPEDKKWHRHPIFAKLEDEVAYHETYPTIYHLRKKLADSSEQADLRLIYLALAHIVKYRGHFLIEGKLSTENISVKDQFQQFMVIYNQTFVNGESPLPESVLIEEELTEKASRTKKSEKVLQQFPQEKANGLFGQFLKLMVGNKADFKKVFGLEEEAKITYASESYEEDLEGILAKVGDEYSDVFLAAKNVYDAVELSTILADSDKKSHAKLSSSMIVRFTEHQEDLKNFKRFIRENCPDEYDNLFKNEQKDGYAGYIAHAVSQLKFYQYVKKIIQDIAGAEYFLEKIAQENFLRKQRTFDNGVIPHQIHLAELQAIIHRQAAYYPFLKENQKKIEQLVTFRIPYYVGPLSKGDASTFAWLKRQSEEPIRPWNLQETVDLDQSATAFIERMTNFDTYLPSEKVLPKHSLLYEKFMVFNELTKISYTDDRGIKANFSGKEKEKIFDYLFKTRRKVKKKDIIQFYRNEYNTEIVTLSGLEEDQFNASFSTYQDLLKCGLTRAELDHPDNAEKLEDIIKILTIFEDRQRIRTQLSTFKGQFSAEVLKKLERKHYTGWGRLSKKLINGIYDKESGKTILDYLIDDGVSKHYNRNFMQLINDSQLSFKNAIQKAQSSEHEETLSETVNELAGSPAIKKGIYQSLKIVDELVAIMGYAPKRIVVEMARENQTTSTGKRRSIQRLKIVEKAMAEIGSNLLKEQPTTNEQLRDTRLFLYYMQNGKDMYTGDELSLHRLSHYDIDHIIPQSFMKDDSLDNLVLVGSTENRGKSDDVPSKEVVKKMKAYWEKLYAAGLISQRKFQRLTKGEQGGLTLEDKAHFIQRQLVETRQITKNVAGILDQRYNAKSKEKKVQIITLKASLTSQFRSIFGLYKVREVNDYHHGQDAYLNCVVATTLLKVYPNLAPEFVYGEYPKFQAFKENKAMAKAIIYTNLLRFFTEDEPRFTKDGEILWSNSYLKTIKKELNYHQMNIVKKVEVQKGGFSKESIKPKGPSNKLIPVKNGLDPQKYGGFDSPVVAYTVLFTHEKGKKPLIKQEILGITIMEKTRFEQNPILFLEEKGFLRPRVLMKLPKYTLYEFPEGRRRLLASAKEAQKGNQMVLPERLLTLLYHAKQCLLPNQSESLAYVEQHQPEFQEILERVVDFAEVHTLAKSKVQQIVKLFEANQTADVKEIAASFIQLMQFNAMGAPSTFKFFQKDIERARYTSIKEIFDATIIYQSTTGLYETRRKVVD

SEQ ID NO: 209 - protein, 1329 aa, Enterococcus faecalis
MKKDYVIGLDIGTNSVGWAVMTEDYQLVKKKMPIYGNTEKKKIKKNFWGVRLFEEGHTAEDRRLKRTARRRISRRRNRLRYLQAFFEEAMTALDENFFARLQESFLVPEDKKWHRHPIFAKLEDEVAYHETYPTIYHLRKKLADSSEQADLRLIYLALAHIVKYRGHFLIEGKLSTENISVKEQFQQFMIIYNQTFVNGESPLPESVLIEEELTEKASRTKKSEKVLQQFPQEKANGLFGQFLKLMVGNKADFKKVFGLEEEAKITYASESYEEDLEGILAKVGDEYSDVFLAAKNVYDAVELSTILADSDKKSHAKLSSSMIVRFTEHQEDLKKFKRFIRENCPDEYDNLFKNEQKDGYAGYIAHAVSQLKFYQYVKKIIQDIAGAEYFLEKIAQENFLRKQRTFDNGVIPHQIHLAELQAIIHRQAAYYPFLKENQEKIEQLVTFRIPYYVGPLSKGDASTFAWLKRQNEKPIRPWNLQETVDLDQSATAFIERMTNFDTYLPSEKVLPKHSLLYEKFMVFNELTKISYTDDRGIKANFSGKEKEKIFDYLFKTRRKVKKKDIIQFYRNEYNTEIVTLSGLEEDQFNASFSTYQDLLKCGLTRAELDHPDNAEKLEDIIKILTIFEDRQRIRTQLSTFKGQFSAEVLKKLERKHYTGWGRLSKKLINGIYDKESGKTILDYLIDDGVSKHYNRNFMQLINDSQLSFKNAIQKAQSSEHEETLSETVNELAGSPAIKKGIYQSLKIVDELVAIMGYAPKRIVVEMARENQTTSTGKRRSIQRLKIVEKAMAEIGSNLLKEQPTTNEQLRDTRLFLYYMQNGKDMYTGDELSLHRLSHYDIDHIIPQSFMKDDSLDNLVLVGSTENRGKSDDVPSKEVVKKMKAYWEKLYAAGLISQRKFQRLTKGEQGGLTLEDKAHFIQRQLVETRQITKNVAGILDQRYNAKSKEKKVQIITLKASLTSQFRSIFGLYKVREVNDYHHGQDAYLNCVVATTLLKVYPNLAPEFVYGEYPKFQAFKENKATAKAIIYTNLMRFFTEVEPRFTKDGEILWSNSYLKTIKKELNYHQMNIVKKVEVQKGGFSKESIKPKGPSNKLIPVKNGLDPQKYGGFDSPVVAYTVLFTHEKGKKPLIKQEILGITIMEKTKFEQNPILFLEEKGFLRPRVLMKLPKYTLYEFPEGRRRLLASAKEAQKGNQMVLPEHLLTLLYHAKQCLLPNQSESLAYVEQHQPEFQEILERVVDFAEVHTLAKSKVQQIVKLFETNQTADVKEIAASFIQLMQFNAMGAPSTFKFFQKDIERARYTSIKEIFDATIIYQSTTGLYETRRKVVD

SEQ ID NO: 210 - protein, 1329 aa, Enterococcus faecalis
MKKDYVIGLDIGTNSVGWAVMTEDYQLVKKKMPIYGNTEKKKIKKNFWGVRLFEEGHTAEDRRLKRTARRRISRRRNRLRYLQAFFEEAMTALDENFFARLQESFLVPEDKKWHRHPIFAKLEDEVAYHETYPTIYHLRKKLADSSEQADLRLIYLALAHIVKYRGHFLIEGKLSTENISVKEQFQQFMIIYNQTFVNGESPLPESVLIEEELTEKASRTKKSEKVLQQFPQEKANGLFGQFLKLMVGNKADFKKVFGLEEEAKITYASESYEEDLEGILAKVGDEYSDVFLAAKNVYDAVELSTILADSDKKSHAKLSSSMIVRFTEHQEDLKNFKRFIRENCPDEYDNLFKNEQKDGYAGYIAHAVSQLKFYQYVKKIIQDIAGAEYFLEKIAQENFLRKQRTFDNGVIPHQIHLAELQAIIHRQAAYYPFLKENQKKIEQLVTFRIPYYVGPLSKGDASTFAWLKRQSEEPIRPWNLQETVDLDQSATAFIERMTNFDTYLPSEKVLPKHSLLYEKFMVFNELTKISYTDDRGIKANFSGKEKEKIFDYLFKTRRKVKKKDIIQFYRNEYNTEIVTLSGLEEDQFNASFSTYQDLLKCGLTRAELDHPDNAEKLEDIIKILTIFEDRQRIRTQLSTFKGQFSEEVLKKLERKHYTGWGRLSKKLINGIYDKESGKTILDYLIDDGVSKHYNRNFMQLINDSQLSFKNAIQKAQSSEHEETLSETVNELAGSPAIKKGIYQSLKIVDELVAIMGYAPKRIVVEMARENQTTSTGKRRSIQRLKIVEKAMAEIGSNLLKEQPTTNEQLRDTRLFLYYMQNGKDMYTGDELSLHRLSHYDIDHIIPQSFMKDDSLDNLVLVGSTENRGKSDDVPSKEVVKKMKAYWEKLYAAGLISQRKFQRLTKGEQGGLTLEDKAHFIQRQLVETRQITKNVAGILDQRYNAKSKEKKVQIITLKASLTSQFRSIFGLYKVREVNDYHHGQDAYLNCVVATTLLKVYPNLAPEFVYGEYPKFQAFKENKATAKAIIYTNLLRFFTEDEPRFTKDGEILWSNSYLKTIKKELNYHQMNIVKKVEVQKGGFSKESIKPKGPSNKLIPVKNGLDPQKYGGFDSPVVAYTVLFTHEKGKKPLIKQEILGITIMEKTRFEQNPILFLEEKGFLRPRVLMKLPKYTLYEFPEGRRRLLASAKEAQKGNQMVLPEHLLTLLYHAKQCLLPNQSESLAYVEQHQPEFQEILERVVDFAEVHTLAKSKVQQIVKLFEANQTADVKEIAASFIQLMQFNAMGAPSTFKFFQKDIERARYTSIKEIFDATIIYQSTTGLYETRRKVVD

SEQ ID NO: 211 - protein, 1328 aa, Enterococcus faecium
MKKEYTIGLDIGTNSVGWSVLTDDYRLVSKKMKVAGNTEKSSTKKNFWGVRLFDEGQTAEARRSKRTARRRLARRRQRILELQKIFAPEILKIDEHFFARLNESFLVLDEKKQSRHPVFATIKQEKSYHQTYPTIYHLRQALADSSEKADIRLVYLAMAHLLKYRGHFLIEGELNTENSSVTETFRQFLSTYNQQFSEADKLDEAVDCSFVFTEKMSKTKKAETLLKYFPHEKSNGYLSQFIKLMVGNQGNFKNVFGLEEAKLQFSKETYEEDLEELLEKIGDDYIDLFVQAKNVYDAVLLSEILSDSTKNTRAKLSAGMIRRYDAHKEDLVLLKRFVKENLPKKYRAFFGDNSVNGYAGYIEGHATQEDFYKFVKKELTGIRGSEVFLTKIEQENFLRKQRTFDNGVIPHQIHLTELRAIIANQKKHYPFLKEEQEKLESLLTFKIPYYVGPLAKKQENSPFAWLIRKSEEKIKPWNLPEIVDMEGSAVRFIERMINTDMYMPHNKVLPKNSLLYQKFSIYNELTKVRYQDERGQMNYFSSIEKKEIFHELFEKNRKVTKKDLQEFLYLKYDIKHAELSGIEKAFNASYTTYHDFLTMSENKQWLEDPELASMFEEIIKTLTVFEDREMIKTRLSHHEATLGKHIIKKLTKKHYTGWGRLSKELIQGIRDKQSNKTILDYLIDDDFPHHRNRNFMQLINDDSLSFKKEIKKAQMITDTENLEEIVKELTGSPAIKKGILQSLKIVDEIVGIMGYEPANIVVEMARENQTTGRGLKSSRPRLKALEESLKDFGSQLLKEYPTDNSSLQKDRLYLYYLQNGRDMYTGAPLDIHRLSDYDIDHIIPRSFTTDNSIDNKVLVSSKENRLKKDDVPSEKVVKKMRSFWYDLYSSKLISKRKLDNLTKIKLTEEDKAGFIKRQLVETRQITKHVAGILHHRFNKAEDTNEPIRKVRIITLKSALVSQFRNRFGIYKVREINEYHHAHDAYLNGVVALALLKKYPQLAPEFVYGEYLKFNAHKANKATVKKEFYSNIMKFFESDTPVCDENGEIFWDKSKSIAQVKKVINHHHMNIVKKTEIQKGGFSKETVEPKKDSSKLLPRKNNWDPAKYGGLGSPNVAYTVAFTYEKGKARKRTNALEGITIMEREAFEQSPVLFLKNKGYEQAEIEMKLPKYALFELENGRKRMVASKEAQKANSFLLPEHLVTLLYHAKQYDEISHKESFDYVNEHHKEFSEVFARVLEFAGKYTLAEKNIEKLEKIYKENQTDDLAKLASSFVNLMQFNAMGAPADFKFFDVTIPRKRYTSLTEIWQSTIIHQSITGLYETRIRMGK

SEQ ID NO: 212 - protein, 1329 aa, Enterococcus faecium
MKKEYTIGLDIGTNSVGWSVLTDDYRLVSKKMKVAGNTEKSSTKKNFWGVRLFDEGQTAEARRSKRTARRRLARRRQRILELQKIFAPEILKIDEHFFARLNESFLVPDEKKQSRHPVFATIKQEKSYHQTYPTIYHLRQALADSSEKADIRLVYLAMAHLLKYRGHFLIEGELNTENSSVTETFRQFLSTYNQQFSEAGKLDEAVDCSFVFTEKMSKTKKAETLLKYFPHEKSNGYLSQFIKLMVGNQGNFKNVFGLEEEAKLQFSKETYEEDLEELLEKIGDDYIDLFVQAKNVYDAVLLSEILSDSTKNTRAKLSAGMIRRYDAHKEDLVLLKRFVKENLPKKYRAFFGDNSVNGYAGYIEGHATQEAFYKFVKKELTGIRGSEVFLTKIEQENFLRKQRTFDNGVIPHQIHLSELRAIIANQKKHYPFLKEEQEKLESLLTFKIPYYVGPLAKKQENSPFAWLIRKSEEKIKPWNLPEIVDMEGSAVRFIERMINTDMYMPHNKVLPKNSLLYQKFSIYNELTKVRYQDERGQMNYFSSIEKKEIFHELFEKNRKVTKKDLQEFLYLKYDIKHAELSGIEKAFNASYTTYHDFLTMSENKQWLEDPELASMFEEIIKTLTVFEDREMIKTRLSHHEATLGKHIIKKLTKKHYTGWGRLSKELIQGIRDKQSNKTILDYLIDDDFPHHRNRNFMQLINDDSLSFKKEIKKAQMITDTENLEEIVKELTGSPAIKKGILQSLKIVDEIVGIMGYEPANIVVEMARENQTTGRGLKSSRPRLKALEESLKDFGSQLLKEYPTDNSSLQKDRLYLYYLQNGRDMYTGAPLDIHRLSDYDIDHIIPRSFTTDNSIDNKVLVSSKENRLKKDDVPSEKVVKKMRSFWYDLYSSKLISKRKLDNLTKIKLTEEDKAGFIKRQLVETRQITKHVAGILHHRFNKAEDTNDPIRKVRIITLKSALVSQFRNRFGIYKVREINEYHHAHDAYLNGVVALALLKKYPQLAPEFVYGEYLKFNAHKANKATVKKEFYSNIMKFFESDTPVCDENGEIFWDKSKSIAQVKKVINHHHMNIVKKTEIQKGGFSKETVEPKKDSSKLLPRKNNWDPAKYGGLGSPNVAYTVAFTYEKGKARKRTNALEGITIMEREAFEQSPVLFLKNKGYEQAEIEMKLPKYALFELENGRKRMVASKEAQKANSFLLPEHLVTLLYHAKQYDEISHKESFDYVNEHHKEFSEVFARVLEFAGKYTLAEKNIEKLEKIYKENQTDDLAKLASSFVNLMQFNAMGAPADFKFFDVTIPRKRYTSLTEIWQSTIIHQSITGLYETRIRMGK

SEQ ID NO: 213 - protein, 1329 aa, Enterococcus faecium
MKKEYTIGLDIGTNSVGWSVLTDDYRLVSKKMKVAGNTEKSSTKKNFWGVRLFDEGQTAEARRSKRTARRRLARRRQRILELQKIFAPEILKIDEHFFARLNESFLVLDEKKQSRHPVFATIKQEKSYHQTYPTIYHLRQALADSSEKADIRLVYLAMAHLLKYRGHFLIEGELNTENSSVTETFRQFLSTYNQQFSEADKLDEAVDCSFVFTEKMSKTKKAETLLKYFPHEKSNGYLSQFIKLMVGNQGNFKNVFGLEEEAKLQFSKETYEEDLEELLEKIGDDYIDLFVQAKNVYDAVLLSEILSDSTKNTRAKLSAGMIRRYDAHKEDLVLLKRFVKENLPKKYRAFFGDNSVNGYAGYIEGHATQEDFYKFVKKELTGIRGSEVFLTKIEQENFLRKQRTFDNGVIPHQIHLTELRAIIANQKKHYPFLKEEQEKLESLLTFKIPYYVGPLAKKQENSPFAWLIRKSEEKIKPWNLPEIVDMEGSAVRFIERMNNTDMYIPHNKVLPKNSLLYQKFSIYNELTKVRYQDERGQMNYFSSIEKKEIFHELFEKNRKVTKKDLQEFLYLKYDIKHAELSGIEKAFNASYTTYHDFLTMSENKQWLEDPELASMFEEIIKTLTVFEDREMIKTRLSHHEATLGKHIIKKLTKKHYTGWGRLSKELIQGIRDKQSNKTILDYLIDDDFPHHRNRNFMQLINDDSLSFKKEIKKAQMITDTENLEEIVKELTGSPAIKKGILQSLKIVDEIVGIMGYEPANIVVEMARENQTTGRGLKSSRPRLKALEESLKDFGSQLLKEYPTDNSSLQKDRLYLYYLQNGRDMYTGAPLDIHRLSDYDIDHIIPRSFTTDNSIDNKVLVSSKENRLKKDDVPSEKVVKKMRSFWYDLYSSKLISKRKLDNLTKIKLTEEDKAGFIKRQLVETRQITKHVAGILHHRFNKAEDTNEPIRKVRIITLKSALVSQFRNRFGIYKVREINEYHHAHDAYLNGVVALALLKKYPQLAPEFVYGEYLKFNAHKANKATVKKEFYSNIMKFFESDTPVCDENGEIFWDKSKSIAQVKKVINHHHMNIVKKTEIQKGGFSKETVEPKKDSSKLLPRKNNWDPAKYGGLGSPNVAYTVAFTYEKGKARKRTNALEGITIMEREAFEQSPVLFLKNKGYEQAEIEMKLPKYALFELENGRKRMVASKEAQKANSFLLPEHLVTLLYHAKQYDEISHKESFDYVNEHHKEFSEVFARVLEFAGKYTLAEKNIEKLEKIYKENQTDDLAKLASSFVNLMQFNAMGAPADFKFFDVTIPRKRYTSLTEIWQSTIIHQSITGLYETRIRMGK

SEQ ID NO: 214 - protein, 1329 aa, Enterococcus faecium
MKKEYTIGLDIGTNSVGWSVLTDDYRLVSKKMKVAGNTEKSSTKKNFWGVRLFDEGQTAEARRSKRTARRRLARRRQRILELQKIFAPEILKIDEHFFARLNESFLVLDEKKQSRHPVFATIKQEKSYHQTYPTIYHLRQALADSSEKADIRLVYLAMAHLLKYRGHFLIEGELNTENSSVTETFRQFLSTYNQQFSEADKLDEAVDCSFVFTEKMSKTKKAETLLKYFPHEKSNGYLSQFIKLMVGNQGNFKNVFGLEEEAKLQFSKETYEEDLEELLEKIGDDYIDLFVQAKNVYDAVLLSEILSDSTKNTRAKLSAGMIRRYDAHKEDLVLLKRFVKENLPKKYRAFFGDNSVNGYAGYIEGHATQEDFYKFVKKELTGIRGSEVFLTKIEQENFLRKQRTFDNGVIPHQIHLTELRAIIANQKKHYPFLKEEQEKLESLLTFKIPYYVGPLAKKQENSPFAWLIRKSEEKIKPWNLPEIVDMEGSAVRFIERMINTDMYIPHNKVLPKNSLLYQKFSIYNELTKVRYQDERGQMNYFSSIEKKEIFHELFEKNRKVTKKDLQEFLYLKYDIKHAELSGIEKAFNASYTTYHDFLTMSENKQWLEDPELASMFEEIIKTLTVFEDREMIKTRLSHHEATLGKHIIKKLTKKHYTGWGRLSKELIQGIRDKQSNKTILDYLIDDDFPHHRNRNFMQLINDDSLSFKKEIKKAQMITDTENLEEIVKELTGSPAIKKGILQSLKIVDEIVGIMGYEPANIVVEMARENQTTGRGLKSSRPRLKALEESLKDFGSQLLKEYPTDNSSLQKDRLYLYYLQNGRDMYTGAPLDIHRLSDYDIDHIIPRSFTTDNSIDNKVLVSSKENRLKKDDVPSEKVVKKMRSFWYDLYSSKLISKRKLDNLTKIKLTEEDKAGFIKRQLVETRQITKHVAGILHHRFNKAEDTNEPIRKVRIITLKSALVSQFRNRFGIYKVREINEYHHAHDAYLNGVVALALLKKYPQLAPEFVYGEYLKFNAHKANKATVKKEFYSNIMKFFESDTPVCDENGEIFWDKSKSIAQVKKVINHHHMNIVKKTEIQKGGFSKETVEPKKDSSKLLPRKNNWDPAKYGGLGSPNVAYTVAFTYEKGKARKRTNALEGITIMEREAFEQSPVLFLKNKGYEQAEIEMKLPKYALFELENGRKRMVASKEAQKANSFLLPEHLVTLLYHAKQYDEISHKESFDYVNEHHKEFSEVFARVLEFAGKYTLAEKNIEKLEKIYKENQTDDLAKLASSFVNLMQFNAMGAPADFKFFDVTIPRKRYTSLTEIWQSTIIHQSITGLYETRIRMGK

SEQ ID NO: 215 - protein, 1328 aa, Enterococcus faecium
MKKEYTIGLDIGTNSVGWSVLTDDYRLVSKKMKVAGNTEKSSTKKNFWGVRLFDEGQTAEARRSKRTARRRLARRRQRILELQKIFAPEILKIDEHFFARLNESFLVLDEKKQSRHPVFATIKQEKSYHQTYPTIYHLRQALADSSEKADIRLVYLAMAHLLKYRGHFLIEGELNTENSSVTETFRQFLSTYNQQFSEADKLDEAVDCSFVFTEKMSKTKKAETLLKYFPHEKSNGYLSQFIKLMVGNQGNFKNVFGLEEAKLQFSKETYEEDLEELLEKIGDDYIDLFVQAKNVYDAVLLSEILSDSTKNTRAKLSAGMIRRYDAHKEDLVLLKRFVKENLPKKYRAFFGDNSVNGYAGYIEGHATQEDFYKFVKKELTGIRGSEVFLTKIEQENFLRKQRTFDNGVIPHQIHLTELRAIIANQKKHYPFLKEEQEKLESLLTFKIPYYVGPLAKKQENSPFAWLIRKSEEKIKPWNLPEIVDMEGSAVRFIERMINTDMYIPHNKVLPKNSLLYQKFSIYNELTKVRYQDERGQMNYFSSIEKKEIFHELFEKNRKVTKKDLQEFLYLKYDIKHAELSGIEKAFNASYTTYHDFLTMSENKQWLEDPELASMFEEIIKTLTVFEDREMIKTRLSHHEATLGKHIIKKLTKKHYTGWGRLSKELIQGIRDKQSNKTILDYLIDDDFPHHRNRNFMQLINDDSLSFKKEIKKAQMITDTENLEEIVKELTGSPAIKKGILQSLKIVDEIVGIMGYEPANIVVEMARENQTTGRGLKSSRPRLKALEESLKDFGSQLLKEYPTDNSSLQKDRLYLYYLQNGRDMYTGAPLDIHRLSDYDIDHIIPRSFTTDNSIDNKVLVSSKENRLKKDDVPSEKVVKKMRSFWYDLYSSKLISKRKLDNLTKIKLTEEDKAGFIKRQLVETRQITKHVAGILHHRFNKAEDTNEPIRKVRIITLKSALVSQFRNRFGIYKVREINEYHHAHDAYLNGVVALALLKKYPQLAPEFVYGEYLKFNAHKANKATVKKEFYSNIMKFFESDTPVCDENGEIFWDKSKSIAQVKKVINHHHMNIVKKTEIQKGGFSEETVEPKKDSSKLLPRKNNWDPAKYGGLGSPNVAYTVAFTYEKGKARKRTNALEGITIMEREAFEQSPVLFLKNKGYEQAEIEMKLPKYALFELENGRKRMVASKEAQKANSFLLPEHLVTLLYHAKQYDEISHKESFDYVNEHHKEFSEVFARVLEFAGKYTLAEKNIEKLEKIYKENQTDDLAKLASSFVNLMQFNAMGAPADFKFFDVTIPRKRYTSLTEIWQSTIIHQSITGLYETRIRMGK

SEQ ID NO: 216 - protein, 1329 aa, Enterococcus faecium
MKKEYTIGLDIGTNSVGWSVLTDDYRLVSKKMKVAGNTEKSSTKKNFWGVRLFDEGQTAEARRSKRTARRRLARRRQRILELQKIFAPEILKIDEHFFARLNESFLVLDEKKQSRHPVFATIKQEKSYHQTYPTIYHLRQALADSSEKADIRLVYLAMAHLLKYRGHFLIEGELNTENSSVTETFRQFLSTYNQQFSEADKLDEAVDCSFVFTEKMSKTKKAETLLKYFPHEKSNGYLSQFIKLMVGNQGNFKNVFGLEEEAKLQFSKETYEEDLEELLEKIGDDYIDLFVQAKNVYDAVLLSEILSDSTKNTRAKLSAGMIRRYDAHKEDLVLLKRFVKENLPKKYRAFFGDNSVNGYAGYIEGHATQEDFYKFVKKELTGIRGSEVFLTKIEQENFLRKQRTFDNGVIPHQIHLTELRAIIANQKKHYPFLKEEQEKLESLLTFKIPYYVGPLAKKQENSPFAWLIRKSEEKIKPWNLPEIVDMEGSAVRFIERMINTDMYMPHNKVLPKNSLLYQKFSIYNELTKVRYQDERGQMNYFSSIEKKEIFHELFEKNRKVTKKDLQEFLYLKYDIKHAELSGIEKAFNASYTTYHDFLTMSENKQWLEDPELASMFEEIIKTLTVFEDREMIKTRLSHHEATLGKHIIKKLTKKHYTGWGRLSKELIQGIRDKQSNKTILDYLIDDDFPHHRNRNFMQLINDDSLSFKKEIKKAQMITDTENLEEIVKELTGSPAIKKGILQSLKIVDEIVGIMGYEPANIVVEMARENQTTGRGLKSSRPRLKALEESLKDFGSQLLKEYPTDNSSLQKDRLYLYYLQNGRDMYTGAPLDIHRLSDYDIDHIIPRSFTTDNSIDNKVLVSSKENRLKKDDVPSEKVVKKMRSFWYDLYSSKLISKRKLDNLTKIKLTEEDKAGFIKRQLVETRQITKHVAGILHHRFNKAEDTNEPIRKVRIITLKSALVSQFRNRFGIYKVREINEYHHAHDAYLNGVVALALLKKYPQLAPEFVYGEYLKFNAHKANKATVKKEFYSNIMKFFESDTPVCDENGEIFWDKSKSIAQVKKVINHHHMNIVKKTEIQKGGFSKETVEPKKDSSKLLPRKNNWDPAKYGGLGSPNVAYTVAFTYEKGKARKRTNALEGITIMEREAFEQSPVLFLKNKGYEQAEIEMKLPKYALFELENGRKRMVASKEAQKANSFLLPEHLVTLLYHAKQYDEISHKESFDYVNEHHKEFSEVFARVLEFAGKYTLAEKNIEKLEKIYKENQTDDLAKLASSFVNLMQFNAMGAPADFKFFDVTIPRKRYTSLTEIWQSTIIHQSITGLYETRIRMGK

SEQ ID NO: 217 - protein, 1329 aa, Enterococcus faecium
MKKEYTIGLDIGTNSVGWSVLTDDYRLVSKKMKVAGNTEKSSTKKNFWGVRLFDEGQTAEARRSKRTARRRLARRRQRILELQKIFAPEILKIDEHFFARLNESFLVLDEKKQSRHPVFATIKQEKSYHQTYPTIYHLRQALADSSEKADIRLVYLAMAHLLKYRGHFLIEGELNTENSSVTETFRQFLSTYNQQFSEADKLDEAVDCSFVFTEKMSKTKKAETLLKYFPHEKSNGYLSQFIKLMVGNQGNFKNVFGLEEEAKLQFSKETYEEDLEELLEKIGDDYIDLFVQAKNVYDAVLLSEILSDSTKNTRAKLSAGMIRRYDAHKEDLVLLKRFVKENLPKKYRAFFGDNSVNGYAGYIEGHATQEDFYKFVKKELTGIRGSEVFLTKIEQENFLRKQRTFDNGVIPHQIHLTELRAIIANQKKHYPFLKEEQEKLESLLTFKIPYYVGPLAKKQENSPFAWLIRKSEEKIKPWNLPEIVDMEGSAVRFIERMINTDMYIPHNKVLPKNSLLYQKFSIYNELTKVRYQDERGQMNYFSSIEKKEIFHELFEKNRKVTKKDLQEFLYLKYDIKHAELSGIEKAFNASYTTYHDFLTMSENKQWLEDPELASMFEEIIKTLTVFEDREMIKTRLSHHEATLGKHIIKKLTKKHYTGWGRLSKELIQGIRDKQSNKTILDYLIDDDFPHHRNRNCMQLINDDSLSFKKEIKKAQMITDTENLEEIVKELTGSPAIKKGILQSLKIVDEIVGIMGYEPANIVVEMARENQTTGRGLKSSRPRLKALEESLKDFGSQLLKEYPTDNSSLQKDRLYLYYLQNGRDMYTGAPLDIHRLSDYDIDHIIPRSFTTDNSIDNKVLVSSKENRLKKDDVPSEKVVKKMRSFWYDLYSSKLISKRKLDNLTKIKLTEEDKAGFIKRQLVETRQITKHVAGILHHRFNKAEDTNEPIRKVRIITLKSALVSQFRNRFGIYKVREINEYHHAHDAYLNGVVALALLKKYPQLAPEFVYGEYLKFNAHKANKATVKKEFYSNIMKFFESDTPVCDENGEIFWDKSKSIAQVKKVINHHHMNIVKKTEIQKGGFSKETVEPKKDSSKLLPRKNNWDPTKYGGLGSPNVAYTVAFTYEKGKARKRTNALEGITIMEREAFEQSPVLFLKNKGYEQAEIEMKLPKYALFELENGRKRMVASKEAQKANSFLLPEHLVTLLYHAKQYDEISHKESFDYVNEHHKEFSEVFARVLEFAGKYTLAEKNIEKLEKIYKENQTDDLAKLASSFVNLMQFNAMGAPADFKFFDVTIPRKRYTSLTEIWQSTIIHQSITGLYETRIRMGK

SEQ ID NO: 218 - protein, 1329 aa, Enterococcus faecium
MTKDYTIGLDIGTNSVGWAVLTDDYQLMKRKMSVHGNTEKKKIKKNFWGARLFDEGQTAEFRRTKRTNRRRLARRKYRLSKLQDLFAEELCKQDDCFFVRLEESFLVPEEKQYKPASIFPTLEEEKEYYQKYPTIYHLRQKLVDSTEKEDLRLVYLALAHLLKYRGHFLFEGDLDTENTSIEESFRVFLEQYSKQSDQPLIVHQPVLTILTDKLSKTKKVEEILKYYPTEKINSFFAQCLKLIVGNQANFKRIFDLEAEVKLQFSKETYEEDLESLLEKIGDEYLDIFLQAKKVHDAILLSEIISSTVKHTKAKLSSGMVERYERHKADLAKFKQFVKENVPQKATVFFKDTTKNGYAGYIKGKTTQEEFYKFVKKELSGVVGSEPFLEKIDQETFLLKQRTYTNGVIPHQVHLIELKAIIDQQKQHYPFLEEAGPKIIALFKFRIPYYVGPLAKEQEASSFAWIERKTAEKINPWNFSEVVDIEKSAMRFIQRMTKQDTYLPTEKVLPKNSLLYQKYMIFNELTKVSYKDERGVKQYFSGDEKQQIFKQLFQKERGKITVKKLQNFLYTHYHIENAQIFGIEKAFNASYSTYHDFMKLAKTNEWLEQPEMEPIFEDIVKILTIFEDRQMIKHQLSKYQEVFGEKLLKEFARKHYTGWGRFSAKLIHGIRDRKTNKTILDYLIDDDVPANRNRNLMQLINDEHLSFKEEIAKATVFSKHKSLVDVIQDLPGSPAIKKGIWQSLKIVEELIAIIGYKPKNIVIEMARENQKTHRTSPRLKALENGLKQIGSTLLKEQPTDNKALQKERLYLYYLQNGRDMYTGEPLEIENLHQYEVDHIIPRSFIVDNSIDDKVLVASKQNQKKRDDVPKKQIVNEQRIFWNQLKEAKLISTKKYAYLTKIELTPEDKARFIQRQLVETRQITKHVANILHQSFNQEEEGTDCDGVQIITLKATLTSQFRQTFGLYKVREINPHHHAHDAYLNGFIANVLLKRYPKLAPEFVYGKYVKYSLARENKATAKKEFYSNILKFLESDEPFCDENGEIYWEKSHHLPRIKKVLSSHQVNVVKKVEQQKGGFYKETVNSKEKPDKLIERKNNWDVTKYGGFGSPVIAYAIAFVYAKGKTQKKTRAIEGITIMEQAAFEKDPTTFLKEKGFPQVTEFIKLPKYTLFEFDNGRRRFLASKESQKGNPFILSDQLVTLLYHAQHYDKITYQESFDYVNTHLSDFSAILTEVLAFAEKYTLADKNIERIQELYEENKYGETSMIAQSFLQLLQFNAIGAPADFKFFGVTIPRKRYTSLTEIWDATIIYQSVTGLYETRIRMGDLWAGEQ

SEQ ID NO: 219 - protein, 1329 aa, Enterococcus faecium
MKKEYTIGLDIGTNSVGWSVLTDDYRLVSKKMKVAGNTEKSSTKKNFWGVRLFDEGQTAEARRSKRTARRRLARRRQRILELQKIFAPEILKIDEHFFARLNESFLVLDEKKQSRHPVFATIKQEKSYHQTYPTIYHLRQALADSSEKADIRLVYLAMAHLLKYRGHFLIEGELNTENSSVTETFRQFLSTYNQQFSEADKLDEAVDCSFVFTEKMSKTKKAETLLKYFPHEKSNGYLSQFIKLMVGNQGNFKNVFGLEEEAKLQFSKETYEEDLEELLEKIGDDYIDLFVQAKNVYDAVLLSEILSDSTKNTRAKLSAGMIRRYDAHKEDLVLLKRFVKENLPKKYRAFFGDNSVNGYAGYIEGHATQEDFYKFVKKELTGIRGSEVFLTKIEQENFLRKQRTFDNGVIPHQIHLTELRAIIANQKKHYPFLKEEQEKLESLLTFKIPYYVGPLAKKQENSPFAWLIRKSEEKIKPWNLPEIVDMEGSAVRFIERMINTDMYMPHNKVLPKNSLLYQKFSIYNELTKVRYQDERGQMNYFSSIEKKEIFHELFEKNRKVTKKDLQEFLYLKYDIKHAELSGIEKAFNASYTTYHDFLTMSENKQWLEDPELASMFEEIIKTLTVFEDREMIKTRLSHHEATLGKHIIKKLTKKHYTGWGRLSKELIQGIRDKQSNKTILDYLIDDDFPHHRNRNFMQLINDDSLSFKKEIKKAQMITDTENLEEIVKELTGSPAIKKGILQSLKIVDEIVGIMGYEPANIVVEMARENQTTGRGLKSSRPRLKALEESLKDFGSQLLKEYPTDNSSLQKDRLYLYYLQNGRDMYTGAPLDIHRLSDYDIDHIIPRSFTTDNSIDNKVLVSSKENRLKKDDVPSEKVVKKMRSFWYDLYSSKLISKRKLDNLTKIKLTEEDKAGFIKRQLVETRQITKHVAGILHHRFNKAEDTNEPIRKVRIITLKSALVSQFRNRFGIYKVREINEYHHAHDAYLNGVIALALLKKYPQLAPEFVYGEYLKFNAHKANKATVKKEFYSNIMKFFESDTPVCDENGEIFWDKSKSIAQVKKVINHHHMNIVKKTEIQKGGFSKETVEPKKDSSKLLPRKNNWDPAKYGGLGSPNVAYTVAFTYEKGKARKRTNALEGITIMEREAFEQSPVLFLKNKGYEQAEIEMKLPKYALFELENGRKRMVASKEAQKANSFLLPEHLVTLLYHAKQYDEISHKESFDYVNEHHKEFSEVFARVLEFAGKYTLAEKNIEKLEKIYKENQTDDLAKLASSFVNLMQFNAMGAPADFKFFDVTIPRKRYTSLTEIWQSTIIHQSITGLYETRIRMGK

SEQ ID NO: 220 - protein, 1329 aa, Enterococcus faecium
MTKDYTIGLDIGTNSVGWAVLTDDYQLMKRKMSVHGNTEKKKIKKNFWGARLFDEGQTAEFRRTKRTNRRRLARRKYRLSKLQDLFAEELCKQDDCFFVRLEESFLVPEEKQYKPASIFPTLEEEKEYYQKYPTIYHLRQKLVDSTEKGDLRLVYLALAHLLKYRGHFLFEGDLDTENTSIEESFRVFLEQYGKQSDQPLIVHQPVLTILTDKLSKTKKVEEILKYYPTEKINSFFAQCLKLIVGNQANFKRIFDLEAEVKLQFSKETYEEDLESLLEKIGDEYLDIFLQAKKVHDAILLSEIISSTVKHTQAKLSSGMVERYERHKADLAKFKQFVKENVPQKATVFFKDTTKNGYAGYIKGKTTQEEFYKFVKKELSGVVGSEPFLEKIDQETFLLKQRTYTNGVIPHQVHLIELKAIIDQQKQHYPFLEEAGPKIIALFKFRIPYYVGPLAKEQEASSFAWIERKTAEKINPWNFSEVVDIEKSAMRFIQRMTKQDTYLPTEKVLPKNSLFYQKYMIFNELTKVSYKDERGVKQYFSGDEKQQIFKQLFQKERGKITVKKLQNFLYTHYHIENAQIFGIEKAFNASYSTYHDFMKLAKTNEWLEQPEMEPIFEDIVKILTIFEDRQMIKHQLSKYQEVFGEKLLKEFARKHYTGWGRFSAKLIHGIRDRKTNKTILDYLIDDDVPANRNRNLMQLINDEHLSFKEEIAKATVFSKHKSLVDVIQDLPGSPAIKKGIWQSLKIVEELIAIIGYKPKNIVIEMARENQKTHRTKPRLKALENGLKQIGSTLLKEQPTDNKALQKERLYLYYLQNGRDMYTGEPLEIENLHQYEVDHIIPRSFIVDNSIDNKVLVASKQNQKKRDDVPKKQIVNEQRIFWNQLKEAKLISPKKYAYLTKIELTPEDKARFIQRQLVETRQITKHVANILHQSFNQEEEGTDCDGVQIITLKATLTSQFRQTFGLYKVREINPHHHAHDAYLNGFIANVLLKRYPKLAPEFVYGKYVKYSLARENKATAKKEFYSNILKFLESDEPFCDENGEIYWEKSHHLPRIKKVLSSHQVNVVKKVEQQKGGFYKETVNSKEKPDKLIERKNNWDVTKYGGFGSPVIAYAIAFVYAKGKTQKKTKAIEGITIMEQAAFEKDPTTFLKDKGFPQVTEFIKLPKYTLFEFDNGRRRFLASKESQKGNPFILSDQLVTLLYHAQHYDKITYQESFDYVNTHLSDFSAILTEVLAFAEKYTLADKNIERIQELYEENKYGEISMIAQSFLQLLQFNAIGAPADFKFFGVTIPRKRYTSLTEIWDATIIYQSVTGLYETRIRMGDLWAGEQ

SEQ ID NO: 221 - protein, 1329 aa, Enterococcus faecium
MTKDYTIGLDIGTNSVGWAVLTDDYQLMKRKMSVHGNTEKKKIKKNFWGARLFDEGQTAEFRRTKRTNRRRLARRKYRLSKLQDLFAEELCKQDDCFFVRLEESFLVPEEKQYKPASIFPTLEEEKEYYQKYPTIYHLRQKLVDSTEKEDLRLVYLALAHLLKYRGHFLFEGDLDTENTSIEESFRVFLEQYSKQSDQPLIVHQPVLTILTDKLSKTKKVEEILKYYPTEKINSFFAQCLKLIVGNQANFKRIFDLEAEVKLQFSKETYEEDLESLLEKIGDEYLDIFLQAKKVHDAILLSEIISSTVKHTKAKLSSGMVERYERHKADLAKFKQFVKENVPQKATVFFKDTTKNGYAGYIKGKTTQEEFYKFVKKELSGVVGSEPFLEKIDQETFLLKQRTYTNGVIPHQVHLIELKAIIDQQKQHYPFLEEAGPKIIALFKFRIPYYVGPLAKEQEASSFAWIERKTAEKINPWNFSEVVDIEKSAMRFIQRMTKQDTYLPTEKVLPKNSLLYQKYMIFNELTKVSYKDERGVKQYFSGDEKQQIFKQLFQKERGKITVKKLQNFLYTHYHIENAQIFGIEKAFNASYSTYHDFMKLAKTNEWLEQPEMEPIFEDIVKILTIFEDRQMIKHQLSKYQEVFGEKLLKEFARKHYTGWGRFSAKLIHGIRDRKTNKTILDYLIDDDVPANRNRNLMQLINDEHLSFKEEIAKATVFSKHKSLVDVIQDLPGSPAIKKGIWQSLKIVEELIAIIGYKPKNIVIEMARENQKTHRTSPRLKALENGLKQIGSTLLKEQPTDNKALQKERLYLYYLQNGRDMYTGEPLEIENLHQYEVDHIIPRSFIVDNSIDNKVLVASKQNQKKRDDVPKKQIVNEQRIFWNQLKEAKLISPKKYAYLTKIELTPEDKARFIQRQLVETRQITKHVANILHQSFNQEEEGTDCDGVQIITLKATLTSQFRQTFGLYKVREINPHHHAHDAYLNGFIANVLLKRYPKLAPEFVYGKYVKYSLARENKATAKKEFYSNILKFLESDEPFCDENGEIYWEKSHHLPRIKKVLSSHQVNVVKKVEQQKGGFYKETVNSKEKPDKLIERKNNWDVTKYGGFGSPVIAYAIAFVYAKGKTQKKTRAIEGITIMEQAAFEKDPTTFLKEKGFPQVTEFIKLPKYTLFEFDNGRRRFLASKESQKGNPFILSDQLVTLLYHAQHYDKITYQESFDYVNTHLSDFSAILTEVLAFAEKYTLADKNIERIQELYEENKYGETSMIAQSFLQLLQFNAIGAPADFKFFGVTIPRKRYTSLTEIWDATIIYQSVTGLYETRIRMGDLWAGEQ

SEQ ID NO: 222 - protein, 1329 aa, Enterococcus faecium
MTKDYTIGLDIGTNSVGWAVLTDDYQLMKRKMSVHGNTEKKKIKKNFWGARLFDEGQTAEFRRTKRTNRRRLARRKYRLSKLQDLFAEELCKQDDCFFVRLEESFLVPEEKQYKPASIFPTLEEEKEYYQKYPTIYHLRQKLVDSTEKEDLRLVYLALAHLLKYRGHFLFEGDLDTENTSIEESFRVFLEQYGKQSDQPLIVHQPVLTILTDKLSKTKKVEEILKYYPTEKINSFFAQCLKLIVGNQANFKRIFDLEAEVKLQFSKETYEEDLESLLEKIGDEYLDIFLQAKKVHDAILLSEIISSTVKHTQAKLSSGMVERYERHKADLAKFKQFVKENVPQKATVFFKDTTKNGYAGYIKGKTTQEEFYKFVKKELSGVVGSEPFLEKIDQETFLLKQRTYTNGVIPHQVHLIELKAIIDQQKQHYPFLEEAGPKIIALFKFRIPYYVGPLAKEQEASSFAWIERKTAEKINPWNFSEVVDIEKSAMRFIQRMTKQDTYLPTEKVLPKNSLLYQKYMIFNELTKVSYKDERGVKQYFSGDEKQQIFKQLFQKERGKITVKKLQNFLYTHYHIENAQIFGIEKAFNASYSTYHDFMKLAKTNEWLEQPEMEPIFEDIVKILTIFEDRQMIKHQLSKYQEVFGEKLLKEFARKHYTGWGRFSAKLIHGIRDRKTNKTILDYLIDDDVPANRNRNLMQLINDEHLSFKEEIAKATVFSKHKSLVDVIQDLPGSPAIKKGIWQSLKIVEELIAIIGYKPKNIVIEMARENQKTHRTKPRLKALENGLKQIGSTLLKEQPTDNKALQKERLYLYYLQNGRDMYTGEPLEIENLHQYEVDHIIPRSFIVDNSIDNKVLVASKQNQKKRDDVPNKQIVNEQRIFWNQLKEAKLISPKKYAYLTKIELTPEDKARFIQRQLVETRQITKHVANILHQSFNQEEEGTDCDGVQIITLKATLTSQFRQTFGLYKVREINPHHHAHDAYLNGFIANVLLKRYPKLAPEFVYGKYVKYSLARENKATAKKEFYSNILKFLESDEPFCDENGEIYWEKSHHLPRIKKVLSSHQVNVVKKVEQQKGGFYKETVNSKEKPDKLIERKNNWDVTKYGGFGSPVIAYAIAFVYAKGKTQKKTRAIEGITIMEQAAFEKDPTTFLKDKGFPHVTEFIKLPKYTLFEFDNGRRRFLASKESQKGNPFILSDQLVTLLYHAQHYDKITYQESFDYVNTHLSDFSAILTEVLAFAEKYTLADKNIERIQELYEENKYGEISMIAQSFLQLLQFNAIGAPADFKFFGVTIPRKRYTSLTEIWDATIIYQSVTGLYETRIRMGDLWAGEQ

SEQ ID NO: 223 - protein, 1324 aa, Enterococcus italicus
MKNDYTIGLDIGTNSVGYSVVTDDYKVISKKMNVFGNTEKKSIKKNFWGVRLFESGQTAQEARMKRTSRRRIARRKNRICYLQEIFQPEMNHLDNNFFYRLNESFLVADDAKYDKHPIFGTLDEEIHFHEQFPTIYHLRKYLADGDEKADLRLVYLAIAHIIKFRGNFLIEGELNTENNSVIELSKVFVQLYNQTLSELEFIDESIDFSEVLTQQLSKSERADNVLKLFPDEKGTGIFAQFIKLIVGNQGNFKKVFQLEEDQKLQLSTDDYEENIENLLAIIGDEYGDIFVAAQNLYQAILLAGILTSTEKTRAKLSASMIQRYEEHAKDLKLLKRFVKEHIPDKYAEIFNDATKNGYAGYIDGKTKEEEFYKYLKTTLVQKSGYQYFIEKIEQENFLRKQRIYDNGVIPHQVHAEELRAILRKQEKYYSFLKENHEKIEQIFKVRIPYYVGPLAKHNEQSRFAWNIRKSDEPIRPWNMNDVVDENASAVAFIERMTIKDIYLNENVLPRHSLIYEKFTVFNELTKVLYADDRGVFQRFSAEEKEDIFEKLFKSERKVTKKKLENYLRIELSISSPSVKGIEEQFNANFGTYLDLKKFDELHPYLDDEKYQDTLEEVIKVLTVFEDRSMIQNQLEQLPLNLSTKTIKALSRRKYTGWGRLSARLIDGIHDKNSGKTILDYLIDESDSYIVNRNFMQLINDDHLSFKKIIEDSQPYKEQQSAEEIVSELSGSPAIKKGILQSLKIVDELVAIMGYKPKNIVVEMARENQTTGRGKQNSKPRLKGIENGLKEFSDSVLKGSSIDNKQLQNDRLYLYYLQNGKDMYTGHELDIDHLSTYDIDHIIPQSFLTDNSIDNRVLTTSKSNRGKSDNVPSEEVVRKMDRFWRKLLNAKLISERKYTNLTKKELTESDKAGFLKRQLVETRQITKHVATILDSKFNEDSNNRDVQIITLKSALVSEFRKTFNLYKVREINDLHHAHDAYLNAVVALSLLRVYPQLKPEFVYGEYGKNSIHDQNKATIKKQFYSNITRYFASKDIINDDGEILWNKQETIAQVIKTLGMHQVNVVKKVEIQKGGFSKESIQPKGESQKLIRRKQQWNTKKYGGFDSPVVAYAILLSFDKGKRKARSFKIVGITIQDRESFEGNPILYLSKKDYHNPKVEAILPKYSLFEFENGRRRMVASSETQKGNQLIIPGHLMELLYHSKKIINGKNSDSVSYIQNNKEKFREIFEYIVDFSSKYISADANLNKIEKIFENNFHKASEQEIAKSFINLLTFTAMGAPADFEFFGEKIPRKRYVSISEIIDAVFIHQSITGLYETRVRLTEV

SEQ ID NO: 224 - protein, 1323 aa, Enterococcus mundtii
MEKEYTIGLDIGTNSVGWAVLTDDYRLVARKMSIQGDSNRKKIKKNFWGARLFEEGKTAQFRRIKRTNRRRIARRRQRVLALQDIFAEEIHKKDPNFFARLEEGDRVEADKRFAKFPVFATLSEEKNYHRQYPTIYHLRHDLANSKEQADIRLVYLAIAHCLKYRGHFLFEGELDTENTSVTENYQQFLQAYQQFFPEPIGDLDDAVPILTERLSKAKRVEKVLAYYPSEKSTGNFAQFLKLMVGNQANFKKTFDLEEEMKLNFTRDCYEEDLNELLEKTSDDYAELFLKAKGVYDAILLSQILSKSDDETKAKLSANMKLRFEEHQRDLKQLKELVRRDLPKKYDDFFKNRSKNGYAGYVKGKATQEDFYKFLRTELAGLEESQSIMEKIDLEIYLLKQRTFANGVIPHQIHLVEMREIMDRQKRFYPFLKGAQGKIEKLLTFRIPYYVGPLAQEGQSPFAWIKRKSPSQITPWNFAEVVDKENSAIEFIERMTNQDTYLPKEKVLPKQSLIYQRFMIFNELTKVSYTDERGKSHYFSSEQKRKIFNELFKQHPRVTEKQLRKFLELNEQIDSTEIKGIETSFNASYSTYHDLLKLSTLLDDPDMTTMFEEIIKILTIFEDREMIREQLKPYETVLGLPAIKKLAKKHYTGWGRLSEKMIQGMREKQSRKTILDYLIDDDFPCNRNRNFMQLINDDHLSFKETIANELIMSDSNVLLDQVKAIPGSPAVKKGIWQSIKIVEEIIGIIGKAPKNIVIEMARENQRTSRSRPRLKALEEALKNIDSPLLKDYPTDNQALQKDRLYLYYLQNGKDMYTGEPLEIHRLSEYDIDHIIPRSFIVDNSLDNKVLVSSKVNRGKLDNAPDPLVVKRMRSHWEKLHQAKLISDKKLANLTKQNLTEADKARFIQRQLVETRQITKHVANLLHQHFNLPEEVSATEKTSIITLKSTLTSQFRQMFDIYKVREINHHHHAHDAYLNGVVAMTLLKKYPKLAPEFVYGSYIKGDINQINKATAKKEFYSNIMKFFESEEIICDEQGEVIWNKKRDLSTIKKTIGAHQVNIVKKVEKQKGGFYKETINSKANPEKLIPRKASLDPLKYGGYGSPLVAYTVIFIFEKGKQKKVTKGIEGITVMEQLRFEQDPREFLKTKGYEGVKQWLILPKYILFEAQGGYRRMIASQETQKANSLILPENLVTLLYHARHYDEINHKVSFDYVNAHKEGFNDIFDFISDFGVRYILAPQHLEKIKVAYEKNKEVDLKEMIDAILSLLKFTLFGASVEFKFFDIKILKRYKSLTDIWEATIIYQSVTGLYERRVEVRKLWDGER

SEQ ID NO: 225 - protein, 1330 aa, Enterococcus phoeniculicola
MKKEYTIGLDIGTNSVGWAVLTENYDLVKKKMKVYGNTETKYLKKNLWGVRLFDEGETAADRRLKRTTRRRYSRRRNRICRLQDLFTEEMNQVDANFFHRLQESFLVPDEKEFERHAIFGKMEEEVSYYREFPTIYHLRKHLADTSEQADLRLVYLALAHIVKYRGHFLIEGELNTENSSVSETFRTFIQVYNQIFRENEPLAVPDNIEELFSEKVSRARKVEAILSVYSEEKSTGTLAQFLKLMVGNQGRFKKTFDLEEDGIIQIPKEEYEEELETLLAIIGDEYAEIFSATKSVYDAVALSGILSVTDGDTKAKLSASMVERYEAHQKDLVQFKQFIRKELPEMYAPIFRDNSVSGYAGYVENSVTQAEFYKYIKKAIEKVPGAEYFLEKIEQETFLDKQRTFNNGVIPHQIHLEELEAIIQKQATYYPFLADNKEEMKQLVTFRIPYYVGPLADGNSPFAWLERISSEPIRPGNLAEVVDIKKSATKFIERMTNFDTYLPTEKVLPKHSMIYEKYMVYNELTKVSYVDERGMNQRFSGEEKKQIVEELFKQSRKVTKKLLEKFLSNEFGLVDVAIKGIETSFNAGYGTYHDFLKIGITREQLDKEENSETLEEIVKILTVFEDRKMIREQLKKYTYLFDEEVLKKLERRHYTGWGRLSAKLLIGIKEKRTHKTILDYLIDDGGKQPINRNLMQLINDSDLSFKSEIAEAQSDMNTEDLHEVVQNLAGSPAIKKGILQSLKIVDELVDIMGSLPKNIVVEMARENQTTSRGRTNSNPRMKALEEAMRNLRSNLLKEYPTDNQALQNDRLYLYYLQNGKDMYTGLDLSLHNLSSYDIDHIVPQSFTTDNSLDNRVLVSSKENRGKKDDVPSKEVVQKNITLWETLKNSNLISQKKYDNLTKGLRGGLTEDDRAHFIKRQLVETRQITKHVARILDQRFNSQKDEEGKTIRAVRVVTLKSSLTSQFRKQFAIHKVREINDYHHGHDAYLNGVVANSLLRVYPQLQPEFVYGDYPKFNAYKANKATAKKQLYTNIMKFFAEDAVIIDENGEILWDKKNIATVKKVMSYPQMNIVKKPEIQTGSFSKETIKPKGDSDKLISRKTNWSPKLYGGFDSPQVAYSVIITYEKGKKKVRAKAIVGITIMEQSLFKKDPVSLLEEKGYANPEVLIHLPKYTLYELENGRRRLLASANEAQKGNQLVLPASLVTLLYHAKQVDEDSGKSEEYVREHRAEFAEILNYVQAFSETKILANKNLQTILKLYEENKEADIKEIAESFVNLMKFSAYGAPMDFKFFGKTIPRSRYTSVGELLSATIINQSITGLYETRRKLVD

SEQ ID NO: 226 - protein, 1327 aa, Staphylococcus aureus
MGKEYTIGLDIGTNSVGWAVLQEDLDLVRRKMKVYGNTEKNYLKKNFWGVDLFDEGMTAKDTRLKRTTRRRYFRRRQRISYLQTFFQEEMNRIDPNFFNRLDESFLIEEDKLSERHPIFGTIEEEVAYHKNYATIYHLRKELADAEEKADLRLVYLALAHIIKYRGHFLIEGRLSTENTSTEETFKTFLQKYNQTFNPVDETISIGSIFADKVSRAKKAEGVLALFPDEKRNGTFDQFLKMIVGNQGNFKKTFELEEDAKLQFSKEEYDESLEALLGEIGDEYADVFEAAKNVYNAVELSGILTVTDNSTKAKLSASMIKRYEDHKTDLKLFKEFIRKNLPEKYHEIFNDKNTDGYAGYIDNSTSQEKFYKYITNLIEKIDGAEYFLKKIENEDFLRKQRTFDNGIIPHQIHLEELKAILHHQAMYYPFLQEKFSNFVDLLTFRIPYYVGPLANGNSRFSWLSRKSDEPIRPWNLAEVVDLSKSAELFIERMTNFDLYLPSEKVLPKHSMLYEKYTVYNELTKVTYKDEQGKVQNFSSEEKERIFIDLFKQHRKVTKKDLSNFLRNEYNLDDVIIDGIENKFNASFNTYHDFLKLKIDPKVLDDPANEPMFEEIVKILTIFEDRKMLREQLSKFSDRLSEKTIKDLERRHYTGWGRLSAKLINGIHDKQSNKTILDYLIDDAPKKNINRNFMQLINDNRLTFKEEIEKEQLKANSEESLIEIVQNLAGSPAIKKGIFQSLKIVDELVEIMGYAPTNIVVEMARENQTTANGRRNSRPRLKNLEKAIDDLDSEILKKHPVDNKALQKDRLYLYYLQNGKDMYTNEELDIHKLSTYDIDHIIPQSFIVDNSLDNRVLVSSSKNRGKLDDVPSKEVVKKMRAFWESLYRSGLISKKKFDNLVKAESGGLSEDDKAGFIHRQLVETRQITKNVARILHQRFNSEKDEEGNLIRKVRIITLKSALTSQFRKNYGIYKIREINDYHHAHDAYLNGVVATALLKIYPQLEPEFVYGEFHRFNAFKENKATAKKQFYSNLMEFSKSDKVIIDENGEILWNQKKIVTVKKVMNYRQMNIVKKVEIQKGGFSKESILPKGDSDKLISRKKEWDTTKYGGFDSPNVAYSVVIRYEKGKTRKLVKTIVGITIMERAAFEKNEREFLKNKGYQNPQICMKLPKYSLYEFDDGRRRLLASAKEAQKGNQMVLPAHLVTFLYHAKHCNEKPDSLKYVTEHQSGFSEIMAHVKDFAEKYTLVDKNLEKILSLYAKNMDSEVKEIAQSFVDLMQLNAFGAPADFKFFGETIPRKRYTSVNELLEATIINQSITGLYETRRRLGD

SEQ ID NO: 227 - protein, 1332 aa, Enterococcus villorum
MNKAYTLGLDIGTNSVGWAVVTDDYRLMAKKMPVHSKMEKKKIKKNFWGARLFDEGQTAEERRNKRATRRRLRRRKYRILELQKIFSEEILKKDSHFFARLDESFLIPEDKQYARFPIFPTLLEEKAYYQNYPTIYHLRQKLADSTEKADIRLVYLALAHMIKYRGHFLFEGELDTENTSVEETFKEFIDIYNEQFEEGIIFYKDIPLILTDKLSKSKKVEKILQYYPKEKTTGCLAQFLKLIVGNQGNFKQAFHLDEEVKIQISKETYEEDLEKLLRKSNEEMIDVFLQVKKVYDAILLSDILSTKMKDTKAKLSAGMIERYQNHKKDLEELKQFVRAHLHEKVTVFFKDSSKDGYAGYIDGKTTQADFYKFLKKELTGVPGSEPMLAKIDQENFLLKQRTPTNGVIPHQVHLTEFKAIIDQQKQYYPFLEKSKEKMIQLLTFRIPYYVGPLAQDKETSSFAWLERKTTEKIKPWNAKDVIDYGASATKFIQRMINYDTYLPTEKVLPKYSMLYQKYTIFNELTKVAYKDDRGIKHQFSSEEKLRIFQELFKKQRRVTKKKLQHFLSANYNIEDAEILGVDKVFNSSYATYHDFLELAKPYELLEQPEMEEMFEDIVKIITIFEDREMVRTQLKKYQRILGEEIFKKLVKKKYTGWGRLSKRLINGIRDQKTNKTILDYLIDDDFPYNRNRNFMQLINDDHLSFKEEIAKELTLSDKQSLLEVVEAIPGSPAIKKGIWQTLKIVEELIAIIGYKPKNIVIEMARENQTTTGGKNRSKPRLKSLEEALKNFDSQLLKERPVDNQSLQKDRLYLYYLQNGKDMYTGESLDIDRLSEYDIDHIIPRSFIVDHSLDNKVLVSSKENRLKKDDVPDSKVVKRMKAYWEKLLRANLISERKFSYLTKLELTDDDKARFIQRQLVETRQITKHVAAILHQYFNQTQELEKEKDIRIITLKSSLVSQFRQVFGIHKVREINHHHHAHDAYLNAVVALALLKKYPRLAPEFVYGSFAKFHLVKENKATAKKEFYSNILKFFEKEEQFCDENGEIFWDKRKHIQQIKKVISSHQVNIVKKVEVQTGSFYKETVNTKEKPDKLIKRKNNWDVTKYGGFGSPVVAYAVVFTYEKGKNHKKAKAIEGITIMEQALFEKDPISFLIEKGYSNVNQFIKLPKYTLFELANGQRRMLASQELQKANSFILPEKLVTLLYHANHYDEIAYKDSYDYVNEHFSNFQDILDKVIIFAEKYTSAPQKLNQIIATYEKNQEADRKIMAHSFVNLMQFNALGAPADFKFFDTTITRKRYTSLTEIWQSTIIYQSVTGLYETRRRMADLWDGVQ

SEQ ID NO: 228 - protein, 1359 aa, synthetic construct
  REGION 1..1359: note = Synthetic Polypeptide
ADKKYSIGLDIGTNSVGWAVITDEYKVPSKKFKVLGNTDRHSIKKNLIGALLFDSGETAEATRLKRTARRRYTRRKNRICYLQEIFSNEMAKVDDSFFHRLEESFLVEEDKKHERHPIFGNIVDEVAYHEKYPTIYHLRKKLVDSTDKADLRLIYLALAHMIKFRGHFLIEGDLNPDNSDVDKLFIQLVQTYNQLFEENINASGVDAKAILSARLSKSRRLENLIAQLPGEKKNGLFGNLIALSLGLTPNFKSNFDLAEDAKLQLSKDTYDDDLDNLLAQIGDQYADLFLAAKNLSDAILLSDILRVNTEITKAPLSASMIKRYDEHHQDLTLLKALVRQQLPEKYKEIFFDQSKNGYAGYIDGGASQEEFYKFIKPILEKMDGTEELLVKLNREDLLRKQRTFDNGSIPHQIHLGELHAILRRQEDFYPFLKDNREKIEKILTFRIPYYVGPLARGNSRFAWMTRKSEETITPWNFEEVVDKGASAQSFIERMTNFDKNLPNEKVLPKHSLLYEYFTVYNELTKVKYVTEGMRKPAFLSGEQKKAIVDLLFKTNRKVTVKQLKEDYFKKIECFDSVEISGVEDRFNASLGTYHDLLKIIKDKDFLDNEENEDILEDIVLTLTLFEDREMIEERLKTYAHLFDDKVMKQLKRRRYTGWGRLSRKLINGIRDKQSGKTILDFLKDGFANRNFMQLIHDDSLTFKEDIQKAQVSGQGDSLHEHIANLAGSPAIKKGILQTVKVVDELVKVMGRHKPENIVIEMARENQTTQKGQKNSRERMKRIEEGIKELGSQILKEHPVENTQLQNEKLYLYYLQNGRDMYVDQELDINRLSDYDVDHIVPQSFLKDDSIDNKVLTRSDKNRGKSDNVPSEEVVKKMKNYWRQLLNAKLITQRKFDNLTKAERGGLSELDKAGFIKRQLVETRQITKHVAQILDSRMNTKYDENDKLIREVKVITLKSKLVSDFRKDFQFYKVREINNYHHAHDAYLNAVVGTALIKKYPKLESEFVYGDYKVYDVSEQEIGKATAKYFFYSNIMNFFKTEITLANGEIRKRPLIETNGETGEIVWDKGRDFATVRKVLSMPQVNIVKKTEVQTGGFSKESILPKRNSDKLIARKKDWDPKKYGGFDSPTVAYSVLVVAKVEKGKSKKLKSVKELLGITIMERSSFEKNPIDFLEAKGYKEVKKDLIIKLPKYSLFELENGRKRMLASGELQKGNELALPSKYVNFLYLASHYEKLKGSPEDNEQKQLFVEQHKHYLDEIIEQISEFSKRVILADANLDKVLSAYNKHRDKPIREQAENIIHLFTLTNLGAPAAFKYFDTTIDRKRYTSTKEVLDATLIHQSITGLYETRIDLSQLGGD

SEQ ID NO: 229 - protein, 1300 aa, Kandleria vitulina
NNKIYNIGLDIGDASVGWAVVDEHYNLLKRHGKHMWGSRLFTQANTAVERRSSRSTRRRYNKRRERIRLLRGIMEDMVLDVDPTFFIRLANVSFLDQEDKKDYLKSNYNLFIDKDFNDKTYYDKYPTIYHLRKHLCESKEKEDPRLIYLALHHIVKYRGNFLYEGQKFSMDVSNIEDKMIDVLRQFNEINLFEYVEDKKIDEVLNVLKEPLSKKHKADKAFALFDTTKDNKAAYKELCAALAGNKFNVTKMLKEAELHDEDEKDISFKFSDATFDDAFVEKQPLLGDCVEFIDLLHDIYSWVELQNILGSAHTSEPSISAAMIQRYEDHKNDLKLLKDVIRKYLPKKYFEVFRDEKSKKNNYCNYINHKTPVDEFYKYIKKLIEKIDDPDVKTILNKIELESFMLKQNSRTNGAVPYQMQLDELNKILENQSVYYSDLKDNEDKIRSILTFRIPYYFGPLITKDRQFDWIIKKEGKENERILPWNANEIVDVDKTADEFIKRMRNFCTYFPDEPVLAKNSLTVSKYEVLNEINKLRINDHLIKRDIKDKMLHTLFMDHKSISANAMKKWLVKNQYFSNTDDIKIEGFQKENACSTSLTPWIDFTKIFGEINNSNYELIEKIIYDVTVFEDKKILRRRLKKEYDLDEEKIKKILKLKYSGWSRLSKKLLSGIKTKRTPETVLEVMETNMNLMQVINDEKLGFKKTIDDANSTSVSGKFSYAEVQELAGSPAIKRGIWQALLIVDEIKKIMKHEPAHVYIEFARNEDKERKDSFVNQMLKLYKDFEDEANKHLKGEDAKSKIRSERLKLYYTQMGKCMYTGKSLDIDRLDTYQVDHIVPQSLLKDDSIDNKVLVLSSENQRKLDDLVIPEMIRNKMFGFWNKLYENKIISPKKFYSLIKSEYSDKDKERFINRQIVETRQITKHVAQIISNHYETTKVVTVRADLSHAFRERYHIYKNRDINDFHHAHDAYIATILGTYIGHRFESLDAKYIYGEYQKIFRNKNKDKKDGFILNSMRNLYADKDTGEVVWDPEWISRIKKCFYYKDCFVTKKLEENNGSFFNTVRPNDEHSEKGAKVPVNKLRSNVHKYGGFEGLKYSIVAIKGKKKKGKKIIDVNKLVGIPLMYKNVDDETKINYIKESEGLEEVKIIKEILKNQLIEINGGLFYVTSEIVNARQLILDFNCTRIIDGIYKAMKYKNYSELSQEEIMNVYDIFVEKLKLYYPTYKNIATNFENFENISDEEKCEVIQMLVVMHAGPQNGNITFDDFKLSNRLGRLNCKTISLTTVFIADSPTGMYSKKYKL

SEQ ID NO: 230 - protein, 1301 aa, Kandleria vitulina
NNKIYNIGLDIGDASVGWAVVDEHYNLLKRHGKHMWGSRLFTQANTAVERRSSRSTRRRYNKRRERIRLLREIMEDMVLDVDPTFFIRLANVSFLDQEDKKDYLKSNYNLFIDKDFNDKTYYDKYPTIYHLRKHLCESKEKEDPRLIYLALHHIVKYRGNFLYEGQKFSMDVSNIEDKMIDVLRQFNEINLFEYVEDKKIDEVLNVLKEPLSKKHKAEKAFALFDTTKDNKAAYKELCAALAGNKFNVTKMLKEAELHDEDEKDISFKFSDATFDDAFVEKQPLLGDCVEFIDLLHDIYSWVELQNILGSAHTSEPSISAAMIQRYEDHKNDLKLLKDVIRKYLPKKYFEVFRDEKSKKNNYCNYINHKTPVDEFYKYIKKLIEKIDDPDVKTILNKIELESFMLKQNSRTNGAVPYQMQLDELNKILENQSVYYSDLKDNEDKIRSILTFRIPYYFGPLITKDRQFDWIIKKEGKENERILPWNANEIVDVDKTADEFIKRMRNFCTYFPDEPVMAKNSLTVSKYEVLNEINKLRINDHLIKRDMKDKMLHTLFMDHKSISANAMKKWLVKNQYFSNTDDIKIEGFQKENACSTSLTPWIDFTKIFGKINESNYDFIEKIIYDVTVFEDKKILRRRLKKEYDLDEEKIKKILKLKYSGWSRLSKKLLSGIKTKRTPETVLEVMETNMNLMQVINDEKLGFKKTIDDANSTSVSGKFSYAEVQELAGSPAIKRGIWQALLIVDEIKKIMKHEPAHVYIEFARNEDKERKDSFVNQMLKLYKDFEDEANKHLKGEDAKSKIRSERLKLYYTQMGKCMYTGKSLDIDRLDTYQVDHIVPQSLLKDDSIDNKVLVLSSENQRKLDDLVIPSSIRNKMYGFWEKLFNNKIISPKKFYSLIKTEFNEKDQERFINRQIVETRQITKHVAQIIDNHYENTKVVTVRADLSHQFRERYHIYKNRDINDFHHAHDAYIATILGTYIGHRFESLDAKYIYGEYKRIFRQKNKGKNDGFILNSMRNIYADKDTGEIVWDPNYIDRIKKCFYYKDCFVTKKLEENNGTFFNTVLPNDTNSDKDATVPVNKYRSNVNKYGGFSGVNSFIVAIKGKKKKGKKVIEVNKLTGIPLMYKNADEEIKINYLKQAEDLEEVQIGKEILKNQLIEKDGGLYYIVAEIINAKQLILNESQTKLVCEIYKAMKYKNYDNLDSEKIIDLYRLLINKMELYYPEYRKQLVKKFEDLKVISIEEKCNIIQILATLHCNSSIGKIMYSDFKISTTIGRLNGRTISLDISFIAESPTGMYSKKYKL

SEQ ID NO: 231 - protein, 1304 aa, Lactobacillus animalis
LKKDYSIGLDIGTNSVGHAVVTDDYKVPTKKMKVFGDTSKKTIKKNMLGVLLFNEGQTAADTRLKRGARRRYTRRKNRLRYLQEIFAPALAKVDPNFFYRLEESSLVAEDKKYDVYPIFGKREEELLYHDTHKTIYHLRSELANNDRPADLRLVYLALAHIIKYRGNFLLEGEIDLRTTDINKVFAEFSETLNENSDENLGKLDVADIFKDNTFSKTKKSEELLKLSGKKNQLAHQLFKMMVGNMGSFKKVLGTDEEHKLSFGKDTYEDDLNDLLAEAGDQYLDIFVAAKKVYDAAILASILDVKDTQTKTVFSQAMIERYEEHQKDLIELKRVFKKYLPEKCHDFFSEPKISGYAGYIDGKVSEEDFYKYTKKTLKGIPETEEILQKIDANNYLRKQRTFDNGAIPHQVHLKELVAIVENQGKYYPFLRENKDKFEKILNFRIPYYVGPLARGNSKFAWLTRAGEGKITPYNFDEMIDKETSAEDFIKRMTINDLYLPTEPVLPKHSLLYERYTIFNELAGVRYVTENGEAKYFDAQTKRSIFELFKLDRKVSEKMVIKHLKVVMPAIRIQALKGLDNGKFNASYGTYKDLVDMGVAPELLNDEVNSEKWEDIIKTLTIFEGRKLIKRRLENYRDFLGEDILRKLSRKKYTGWGRLSAKLLDGIYDKKTHKTILDCLMEDYSQNFMQLINDDTYSFKETIKNAQVIEKEETLAKTVQELPGSPAIKKGILQSLEIVDEIIKVMGYKPKSIVVEMARETQTHGTRKREDRVQQIVKNLKELPKPSNAELSDERKYLYCLQNGRDMYTGAPLDYDHLQFYDVDHIIPQSFLKDDSIENKVLTIKKENVRKTNGLPSEAVIQKMGSFWKKLLDAGAMTNKKYDNLRRNLHGGLNEKLKERFIERQLVETRQITKYVAQLLDQRLNYDGNGVELDEKIAIVTLKAQLASQFRSEFKLRKVRALNNLHHAHDAYLNAVVANLIMAKYPELEPEFVYGKYRKTKFKGLGKATAKNTLYANVLYFLKENEVYPFWDKARDLPTIKRYLYRAQVNKVRKAERQTGGFSDEMLVPKSDSGKLLPRKEGLDPVKYGGYAKAVESYAVLITADEVKKGKTKKVKTLVNIPIIDSKKYEADPTAYLASRGYTNVTNSFILPKYSLLEDPEGRRRYLASKEFQKANELILPQHLVELLYWVNAKDGEQKLEDHKAEFKELFDKIMEFADKYVVAPKNSEKIRRLYEENQDATPMELGKNFVELLRYTADGAASDFKFFGENIPRKRYNSAGSLLNGTLIYQSKTGLYETRIDLGKL

SEQ ID NO: 232 - protein, 1292 aa, Lactobacillus curvatus
MSRPYNIGLDIGTSSIGWSVVDDQSKLVSVRGKYGYGVRLYDEGQTAAERRSFRTTRRRLKRRKWRLGLLREIFEPYITPVDDTFFLRKKQSNLSPKDQRKQTSLFNDRTDRAFYDDYPTIYHLRYKLMTEKRQFDIREIYLAMHHIVKYRGHFLNEAPVSSFKSSEINLVAHFDRLNTIFADLFSESGFTDKLAEVKALLLDNHQSASNRQRQALLLIYTPSKQNKAIATELLKAILGLKAKFNVLTGIEAEDVKTWTLTFNAENFDEEMVKLESSLDDNAHQIIESLQELYSGVLLAGIVPENQSLSQAMITKYDDHQKHLKMLKAVREALAPEDRQRLKQAYDQYVDGKSKEDFYGDITKALKNNPDHPIVSEIKKLIELDQFMPKQRTKDNGAIPHQLHQQELDRIIENQQQYYPWLAELNPNKLDELVAFRVPYYVGPLQQQSSDAKFAWMIRKAEGQITPWNFDDKVDRQASANEFIKRMTTTDTYLLAEDVLPKQSLIYQRFEVLNELNGLKIDDQPITTELKQAIFTDLFMQKTSVTVKNIQDYLVSEKRYASRPAITGLSDENKFNSRLSTYHDLKTIVGDAVDDVDKQADLEKCIEWSTIFEDGKIYSAKLNEIDWLTDQQRVQLAAKRYRGWGRLSAKLLTQIVNANGQRIMDLLWTTDNFMRIVHSEDFDKLITEANQMMLAENDVQDVINDLYTSPQNKKALRQILLVVNDIQKAMKGQAPERILIEFAREDEVNPRLSVQRKRQVEQVYQNISELEIRNELKDLSNSALSNTRLFLYFMQGGRDMYTGDSLNIDRLSTYDIDHILPQSFIKDNSLDNRVLVSQRMNRSKADQVPSVELGQKMQIQWEQMLRAGLITKKKYDNLTLNPDMKGFINRQLVETRQVIKLATNLLMEQYGEDNIELITVKSGLTHQMRTEFDFPKNRNLNNHHHAFDAYLTAFVGLYLLKRYPKLKPYFVYGEYQKASQQDKRNFNFLNGLKKDELVDENTEAVIWNKESGLAYLNKIYQFKKILVTREVHENSGALFNQTLYAAKDDKASGQLIPAKQDRPTALYGGYSGKTVAYMCIVRIKNKKGDLYKVCGVETSWLAQLKQKKAFLKQKISPQFTKVKKQKGTIVKVVEDFEVIAPHILINQRFFDNGQELTLGSHNEQELILDKTAVKLLNGALPLTQSEELAEQVYDEILDQVMHYFPLYDTNQFRAKLSAGKAADGNKMVQVGQQVILDRVLIGLHANAAVSDLGVLKISTPLGKMQQPSGISDTQIIYQSPTGLFERRVALRDL

SEQ ID NO: 233 - protein, 1291 aa, Lactobacillus farciminis
KEQPYNIGLDIGTGSVGWAVTNDNYDLLNIKKKNLWGVRLFEGAQTAKETRLNRSTRRRYRRRKNRINWLNEIFSEELANTDPSFLIRLQNSWVSKKDPDRKRDKYNLFIDNPYTDKEYYREFPTIFHLRKELIINKNKADIRLVYLALHNILKYRGNFTYEHQKFNISTLNSNLSKELIELNQQLIKYDISFPDNCDWNHISDILIGRGNATQKSSNILNNFTKETKKLLKEVINLILGNVAHLNTIFKTSLTKDEEKLSFSGKDIESKLDDLDSILDDDQFTVLDTANRIYSTITLNEILNGESYFSMAKVNQYENHAIDLCKLRDMWHTTKNEKAVGLSRQAYDDYINKKKELYTSLKKFLKVALPTNLAKEAEEKISKGTYLVKPRNSENGVVPYQLNKIEMEKIIDNQSQYYPFLKENKEKLLSILSFRIPYYVGPLQSSEKNPFAWMERKSNGHARPWNFDEIVDREKSSNKFIRRMTVTDSYLVGEPVLPKNSLIYQRYEVLNELNNIRITENLKTNPTGSRLTVETKQHIYNELFKNYKKITVKKLTKWLIAQGYYKNPILIGLSQKDEFNSTLTTYLDMKKIFGSSFMENNKNYNQIEELIEWLTIFEDKQILNEKLHSSNYSYTSDQIKKISNMRYKGWGRLSKKILTCITTETNTPKSLQLSNDLMWTTNNNFISIISNDKYDFKNYIENHNLNKNEDQNISNLVNDIHVSPALKRGITQSIKIVQEIVKFMGHAPKYIFIEVTRETKTTSRGKRIQRLQSKLLNKANGLVPEELKKHKNDLSSERIMLYFLQNGKSLYSEESLNINKLSDYQVDHILPRTYIPDDSLENKALVLAKENQRKADDLLLNSNVIDKNLERWTYMLNNNMMGLKKFKNLTRRVITDKDKLGFIHRQLVQTSQMVKGVANILNSMYKNQGTTCIQARANLSTAFRKALELVKNRNINDFHHAQDAYLASFLGTYRLRRFPTDEMLLMNGEYNKFYGKELYSKKSRKNGFIISPLVNGTTQDRNTGEIIWNVGFRDKILKIFNYHQCNVTRKTEIKTGQFYDQTIYSPKNPKKLIAQKKDMDPNIYGGFSGDNKSSITIVKIDNNKIKPVAIPIRLINDKKTLQNWLEENVKHKKSIQIIKNNVPIGQIIYSKKVGLLSREIANRQQLILPPEHSALLRILQIPDEDPDQILAFYDKNILVEILQELITKMKKFYPFYKNEQEFLASFNQATTSEKINSLEELITLLHANSTSAHLIFNNIEKKAFGRKTHGLTDTDFIYQSVTGLYETRIHIE

SEQ ID NO: 234 - protein, 1327 aa, Listeria innocua
MKKPYTIGLDIGTNSVGWAVLTDQYDLVKRKMKIAGDSEKKQIKKNFWGVRLFDEGQTAADRRMARTARRRIERRRNRISYLQGIFAEEMSKTDANFFCRLSDSFYVDNEKRNSRHPFFATIEEEVEYHKNYPTIYHLREELVNSSEKADLRLVYLALAHIIKYRGNFLIEGALDTQNTSVDGIYKQFIQTYNQVFASGIEKLEDNKDVAKILVEKVTRKEKLERILKLYPGEKSAGMFAQFISLIVGSKGNFQKPFDLIEKSDIECAKDSYEEDLESLLALIGDEYAELFVAAKNAYSAVVLSSIITVAETETNAKLSASMIERFDTHEEDLGELKAFIKLHLPKHYEEIFSNTEKHGYAGYIDGTKQADFYKYMKMTLENIEGADYFIAKIEKENFLRKQRTFDNGAIPHQLHLEELEAILHQQAKYYPFLKENYDKIKSLVTFRIPYFVGPLANGQSEFAWLTRKADGEIRPWNIEEKVDFGKSAVDFIEKMTNKDTYLPKENVLPKHSLCYQKYLVYNELTKVRYINDQGKTSYFSGQEKEQIFNDLFKQKRKVKKKDLELFLRNMSHVESPTIEGLEDSFNSSYSTYHDLLKVGIKQEILDNPVNTEMLENIVKILTVFEDKRMIKEQLQQFSDVLDGVVLKKLERRHYTGWGRLSAKLLMGIRDKQSHLTILDYLMDDGLNRNLMQLINDSNLSFKSIIEKEQVTTADKDIQSIVADLAGSPAIKKGILQSLKIVDELVSVMGYPPQTIVVEMARENQTTGKGKNNSRPRYKSLEKAIKEFGSQILKEHPTDNQELRNNRLYLYYLQNGKDMYTGQDLDIHNLSNYDIDHIVPQSFITDNSIDNLVLTSSAGNREKGDDVPPLEIVRKRKVFWEKLYQGNLMSKRKFDYLTKAERGGLTEADKARFIHRQLVETRQITKNVANILHQRFNYEKDDHGNTMKQVRIVTLKSALVSQFRKQFQLYKVRDVNDYHHAHDAYLNGVVANTLLKVYPQLEPEFVYGDYHQFDWFKANKATAKKQFYTNIMLFFAQKDRIIDENGEILWDKKYLDTVKKVMSYRQMNIVKKTEIQKGEFSKATIKPKGNSSKLIPRKTNWDPMKYGGLDSPNMAYAVVIEYAKGKNKLVFEKKIIRVTIMERKAFEKDEKAFLEEQGYRQPKVLAKLPKYTLYECEEGRRRMLASANEAQKGNQQVLPNHLVTLLHHAANCEVSDGKSLDYIESNREMFAELLAHVSEFAKRYTLAEANLNKINQLFEQNKEGDIKAIAQSFVDLMAFNAMGAPASFKFFETTIERKRYNNLKELLNSTIIYQSITGLYESRKRLDD

SEQ ID NO: 235 - protein, 1327 aa, Listeria innocua
MKKPYTIGLDIGTNSVGWAVLTDQYDLVKRKMKIAGDSEKKQIKKNFWGVRLFDEGQTAADRRMARTARRRIERRRNRISYLQGIFAEEMSKTDANFFCRLSDSFYVDNEKRNSRHPFFATIEEEVEYHKNYPTIYHLREELVNSSEKADLRLVYLALAHIIKYRGNFLIEGALDTQNTSVDGIYKQFIQTYNQVFASGIEKLEDNKDVAKILVEKVTRKEKLERILKLYPGEKSAGMFAQFISLIVGSKGNFQKPFDLIEKSDIECAKDSYEEDLESLLALIGDEYAELFVAAKNAYSAVVLSSIITVAETETNAKLSASMIERFDTHEEDLGELKAFIKLHLPKHYEEIFSNTEKHGYAGYIDGTKQADFYKYMKMTLENIEGADYFIAKIEKENFLRKQRTFDNGAIPHQLHLEELEAILHQQAKYYPFLKENYDKIKSLVTFRIPYFVGPLANGQSEFAWLTRKADGEIRPWNIEEKVDFGKSAVDFIEKMTNKDTYLPKENVLPKHSLCYQKYLVYNELTKVRYINDQGKTSYFSGQEKEQIFNDLFKQKRKVKKKDLELFLRNMSHVESPTIEGLEDSFNSSYSTYHDLLKVGIKQEILDNPVNTEMLENIVKILTVFEDKRMIKEQLQQFSDVLDGVVLKKLERRHYTGWGRLSAKLLMGIRDKQSHLTILDYLMDDGLNRNLMQLINDSNLSFKSIIEKEQVTTADKDIQSIVADLAGSPAIKKGILQSLKIVDELVSVMGYPPQTIVVEMARENQTTGKGKNNSRPRYKSLEKAIKEFGSQILKEHPTDNQELRNNRLYLYYLQNGKDMYTGQDLDIHNLSNYDIDHIVPQSFITDNSIDNLVLTSSAGNREKGDDVPPLEIVRKRKVFWEKLYQGNLMSKRKFDYLTKAERGGLTEADKARFIHRQLVETRQITKNVANILHQRFNYEKDDHGNTMKQVRIVTLKSALVSQFRKQFQLYKVRDVNDYHHAHDAYLNGVVANTLLKVYPQLEPEFVYGDYHQFDWFKANKATAKKQFYTNIMLFFAQKDRIIDENGEILWDKKYLDTVKKVMSYRQMNIVKKTEIQKGEFSKATIKPKGNSSKLISRKTNWDPMKYGGLDSPNMAYAVVIEYAKGKNKLVFEKKIIRVTIMERKAFEKDEKAFLEEQGYRQPKVLAKLPKYTLYECEEGRRRMLASANEAQKGNQQVLPNHLVTLLHHVANCEVSDGKSLDYIESNREMFAELLAHVSEFAKRYTLAEANLNKINQLFEQNKEGDIKAIAQSFVDLMAFNAMGAPASFKFFETTIERKRYNNLKELLNSTIIYQSITGLYESRKRLDD

SEQ ID NO: 236 - protein, 1327 aa, Listeria innocua; identical to SEQ ID NO: 235

SEQ ID NO: 237 - protein, 1101 aa, Listeria innocua
LKLYPGEKSTGMFAQFISLIVGSKGNFQKPFDLIEKSDIECAKDSYEEDLESLLALIGDEYAELFVAAKNAYSAVVLSSIITVAETETNAKLSASMIERFDTHEEDLGELKAFIKLHLPKHYEEIFSNTEKHGYAGYIDGTKQADFYKYMKTTLENIEGADYFIAKIEKENFLRKQRTFDNGAIPHQLHLEELEAILHQQAKYYPFLKENYDKIKSLVTFRIPYFVGPLANGQSEFAWLTRKADGEIRPWNIEEKVDFGKSAVDFIEKMTNKDTYLPKENVLPKHSLCYQKYLVYNELTKVRYINDQGKTSYFSGQEKEQIFNDLFKQKRKVKKKDLELFLRNMSHVESPTIEGLEDSFNSSYSTYHDLLKVGIKQEILDNPVNTEMLENIVKILTVFEDKRMIKEQLQQFSDVLDGVVLKKLERRHYTGWGRLSAKLLMGIRDKQSHLTILDYLMDDGLNRNLMQLINDSNLSFKSIIEKEQVTTADKDIQSIVADLAGSPAIKKGILQSLKIVDELVSVMGYPPQTIVVEMARENQTTGKGKNNSRPRYKSLEKAIKEFGSQILKEHPTDNQELKNNRLYLYYLQNGKDMYTGQDLDIHNLSNYDIDHIVPQSFITDNSIDNLVLTSSAGNREKGNDVPPLEIVQKRKVFWEKLYQGNLMSKRKFDYLTKAERGGLTEADKARFIHRQLVETRQITKNVANILHQRFNYGKDDHGNTMKQVRIVTLKSALVSQFRKQFQLYKVRGVNDYHHAHDAYLNGVVANTLLKVYPQLEPEFVYGDYHQFDWFKANKATAKKQFYTNIMLFFAQKDRIIDENGEILWDKKYLDTVKKVMSYRQMNIVKKTEIQKGEFSKATIKPKGNSSKLIPRKTNWDPMKYGGLDSPNMAYAVVIEYAKGKNKLVFEKKIIRVTIMERKAFEKDEKAFLEEQGYRQPKVLAKLPKYTLYECEEGRRRMLASANEAQKGNQQVLPNHLVTLLHHAANCEVSDGKSLDYIESNREMFAELLAHVSEFAKRYTLAEANLNKINQLFEQNKEGDIKAIAQSFVDLMAFNAMGAPASFKFFETTIERKRYNNLKELLNSTIIYQSITGLYESRKRLDD

SEQ ID NO: 238 - protein, 1327 aa, Listeria ivanovii
MRKPYTIGLDIGTNSVGWAVLTDQYNLVKRKMKVAGSAEKKQIKKNFWGVRLFDEGEVAAGRRMNRTTRRRIERRRNRIAYLQEIFAAEMAEVDANFFYRLEDSFYIESEKRHSRHPFFATIEEEVAYHEEYKTIYHLREKLVNSSDKADLRLVYLALAHIIKYRGNFLIEGMLDTKNTSVDEVFKQFIQTYNQIFASDIERLEENKEVAEILSEKLTRREKLDKILKLYTGEKSTGMFARFINLIIGSKGDFKKVFDLDEKAEIECAKDTYEEDLEALLAKIGDEYAEIFVAAKSTYNAVVLSNIITVTDTETKAKLSASMIERFDKHAKDLKRLKAFFKMQLPEKFNEVFNDIEKDGYAGYIDGTTQEKFYKYMKKMLANIDGADYFIDQIEEENFLRKQRTFDNGTIPHQLHLEELEAILHQQAKYYPFLRKDYEKIRSLVTFRIPYFIGPLANGQSDFAWLTRKADGEIRPWNIEEKVDFGKSAIDFIEKMTNKDTYLPKENVLPKHSLCYQKYMVYNELTKIRYIDDQGKTHHFSGQEKQQIFNGLFKQQRKVKKKDLERFLYTINHIESPTIEGVEDAFNSSFATYHDLQKGGVTQEILDNPLNADMLEEIVKILTVFEDKRMIKEQLQSFSDVLDGTILKKLERRHYTGWGRLSAKLLTGIRDKHSHLTILDYLMDDGLNRNLMQLINDSNLSFKSIIEKEQVSTADKGIQSIVAELAGSPAIKKGILQSLKIVDELVGIMGYPPQTIVVEMARENQTTGKGKNNSKPRFISLEKAIKEFGSQILKEHPTDNQCLKNDRLYLYYLQNGKDMYTGKELDIHNLSNYDIDHIIPQSFITDNSIDNRVLVSSTANREKGDNVPLLEVVRKRKAFWEKLYQAKLMSKRKFDYLTKAERGGLTEADKANFIQRQLVETRQITKNVANILYQRFNCKQDENGNEVEQVRIVTLKSTLVSQFRKQFQLYKVREVNDYHHAHDAYLNGVVANTLLKVYPQLEPEFVYGDYHQFDWFKANKATAKKQFYTNIMRFFAKENQIIDKNGEILWDNRYLDTIKKVLSYRQMNIVKKTEIQKGEFSNATVNPKGNSSKLISRKADWNPIKYGGFDGSNMAYSIVIEYEKRKKKTVIKKELIQINIMERVAFEKDQKAFLEEKGYYSPKVLTKIPKYTLYECENGRRRMLGSANEAQKGNQMVLPNHLMTLLYHAKNCEANDGESLAYIEMHREMFAELLAYISEFAKRYTLANDRLEKINMFFEQNKKGDIKVIAKSFDKLKVFNAFGAPRDFEFFETTIKRKRYYNIKELLNATIIYQSITGLYEARKRLED

SEQ ID NO: 239 - protein, 952 aa, Listeria ivanovii
MKKMLANIDGADYFIDQIEEENFLRKQRTFDNGTIPHQLHLEELEAILHQQAKYYPFLRKDYEKIRSLVTFRIPYFIGPLANGQSDFAWLTRKADGEIRPWNIEEKVDFGKSAIDFIEKMTNKDTYLPKENVLPKHSLCYQKYMVYNELTKIRYIDDQGKTHHFSGQEKQQIFNGLFKQQRKVKKKDLERFLYTINHIESPTIEGVEDAFNSSFATYHDLQKGGVTQEILDNPLNADMLEEIVKILTVFEDKRMIKEQLQSFSDVLDGTILKKLERRHYTGWGRLSAKLLTGIRDKHSHLTILDYLMDDGLNRNLMQLINDSNLSFKSIIEKEQVSTADKGIQSIVAELAGSPAIKKGILQSLKIVDELVGIMGYPPQTIVVEMARENQTTGKGKNNSKPRFISLEKAIKEFGSQILKEHPTDNQCLKNDRLYLYYLQNGKDMYTGKELDIHNLSNYDIDHIIPQSFITDNSIDNRVLVSSTANREKGDNVPLLEVVRKRKAFWEKLYQAKLMSKRKFDYLTKAERGGLTEADKANFIQRQLVETRQITKNVANILYQRFNCKQDENGNEVEQVRIVTLKSTLVSQFRKQFQLYKVREVNDYHHAHDAYLNGVVANTLLKVYPQLEPEFVYGDYHQFDWFKANKATAKKQFYTNIMRFFAKENQIIDKNGEILWDNRYLDTIKKVLSYRQMNIVKKTEIQKGEFSNATVNPKGNSSKLISRKADWNPIKYGGFDGSNMAYSIVIEYEKRKKKTVIKKELIQINIMERVAFEKDQKAFLEEKGYYSPKVLTKIPKYTLYECENGRRRMLGSANEAQKGNQMVLPNHLMTLLYHAKNCEANDGESLAYIEMHREMFAELLAYISEFAKRYTLANDRLEKINMFFEQNKKGDIKVIAKSFDKLKVFNAFGAPRDFEFFETTIKRKRYYNIKELLNATIIYQSITGLYEARKRLED

SEQ ID NO: 240 - protein, 1327 aa, Listeria monocytogenes
MKNPYTIGLDIGTNSVGWAVLTNQYDLVKRKMKVAGNSDKKQIKKNFWGVRLFDDGQTAVDRRMNRTARRRIERRRNRISYLQEIFAVEMANIDANFFCRLNDSFYVDSEKRNSRHPFFATIEEEVAYHDNYRTIYHLREKLVNSSEKADLRLVYLALAHIIKYRGNFLIEGALDTKNTSVDEVYKQFIETYNQVFMSNIEKVEENIEVANILAGKFTRREKFERILQLYPGEKSTGMFAQFISLIVGSKGNFQKVFDLIEKTDIECAKDSYEEDLETLLAIIGDEYAELFVAAKNTYNAVVLSSIITVTDTETNAKLSASMIERFDAHEKDLVELKAFIKLNLPKQYEEIFSNAAIDGYAGYIDGTKQVDFYKYLKTILENIEGSDYFIAKIEEENFLRKQRTFDNGAIPHQLHLEELEAIIHQQAKYYPFLKEDYDKIKSLVTFRIPYFVGPLANGQSEFAWLTRKADGEIRPWNIEEKVDFGKSAVDFIEKMTNKDTYLPKENVLPKHSLCYQKYMVYNELTKIRYIDDQGKTNYFSGREKQQVFNDLFKQKRKVKKKDLELFLRNINHIESPTIEGLEDSFNASYATYHDLLKVGMKQEILDNPLNTEMLEDIVKILTVFEDKPMIKEQLQQFSDVLDGGVLKKLERRHYTGWGRLSAKLLVGIREKQSHLTILDYLMDDGLNRNLMQLINDSNLSFKSIIEKEQVSTTDKDLQSIVAELAGSPAIKKGILQSLKIVDELVSIMGYPPQTIVVEMARENQTTGKGKNNSKPRYKSLEKAIKEFGSQILKEHPTDNQELKNNRLYLYYLQNGKDMYTGQELDIHNLSNYDIDHIVPQSFITDNSIDNLVLTSSAGNREKGGDVPPLEIVRKRKVFWEKLYQGNLMSKRKFDYLTKAERGGLTEADKARFIHRQLVETRQITKNVANILYQRFNKETDNHGNTMEQVRIVTLKSALVSQFRKQFQLYKVREVNGYHHAHDAYLNGVVANTLLKVYPQLEPEFVYGEYHQFDWFKANKATAKKQFYTNIMLFFAQKERIIDENGEILWDKKYLETIKKVLDYRQMNIVKKTEIQKGEFSKATIKPKGNSSKLIPRKENWDPMKYGGLDSPNMAYAVIIEHAKGKKKIVIEKKLIQINIMERKMFEKDEEAFLEEKGYRHPKVLTKLPKYTLYECEKGRRRMLASANEAQKGNQLVLSNHLVSLLYHAKNCEASDGKSLKYIEAHRETFSELLAQVSEFATRYTLADANLSKINNLFEQNKEGDIKAIAQSFVDLMAFNAMGAPASFKFFEATIDRKRYTNLKELLSSTIIYQSITGLYESRKRLDD

SEQ ID NO: 241 - protein, 1327 aa, Listeria monocytogenes
MKNPYTIGLDIGTNSVGWAVLTDQYDLVKRKMKVAGNSDKKQIKKNFWGVRLFDDGQTAVDRRMNRTARRRIERRRNRISYLQEIFAVEMANIDANFFCRLNDSFYVDSEKRNSRHPFFATIEEEVAYHKNYRTIYHLREELVNSSEKADLRLVYLALAHIIKYRGNFLIEGALDTKNTSVDEVYKQFIQTYNQVFMSNIEKVEENTEVASILAGKFTRREKFERILRLYPGEKSTGMFAQFISLIVGNKGNFQKVFNLVEKTDIECAKDSYEEDLEALLAIIGDEYAELFVAAKNTYNAVVLSSIITVTATETNAKLSASMIERFDAHEKELGELKAFIKLHLPKQYQEIFNNAEIDGYAGYIDGTKQVDFYKYLKTTLENVEGADYFITKIEEENFLRKQRTFDNGVIPHQLHLEELEAILHQQAKYYPFLREGYDKIKSLVTFRIPYFVGPLANGQSEFAWLTRKDDGEIRPWNIEEKVDFGKSAVDFIEKMTNKDTYLPKENVLPKHSLCYQKYMVYNELTKIRYIDDQGKTNYFSGREKQQIFNDLFKQKRKVKKKDLELFLRNINHIESPTIEGLEDSFNASYATYHDLLKVGLKQEILDNPLNTEILEDIVKILTVFEDKRMIKEQLEQFSDVLDGVVLKKLERRHYTGWGRLSAKLLVGIRDKQSHLTILDYLMDDGLNRNLMQLINDSNLSFKSIIEKEQVSTTDKDLQSIVADLAGSPAIKKGILQSLKIVDELVSIMGYPPQTIVVEMARENQTTGKGKNNSKPRYKSLEKAIKDFGSQILKEHPTDNQELKNNRLYLYYLQNGKDIYTGQELDIHNLSNYDIDHIVPQSFITDNSIDNLVLTSSAGNREKGGDVPPLEIVRKRKVFWEKLYQGNLMSKRKFDYLTKAERGGLTEADKARFIHRQLVETRQITKNVANILHQRFNKETDNHGNTMEQVRIVTLKSALVSQFRKQFQLYKVREVNDYHHAHDAYLNGVVANTLLKVYPQLEPEFVYGEYHQFDWFKANKATAKKQFYTNIMLFFAQKERIIDENGEILWDKKYLETIKKVLDYRQINIVKKTEIQKGEFSKATIKPKGNSSKLIPRKENWDPMKYGGLDSPNMAYAVIIEHAKGKKKIVIEKKLIQINIMERKMFEKDEEAFLEEKGYHQPKVLTKLPKYTLYECEKGRRRMLSSANEAQKGNQLVLSNHLVSLLYHAKNCEASDGKSLKYIEAHRETFSELLAQVSEFATKYTLADANLSKINNLFEQNKEGDIKAIAQSFVDLMAFNAMGAPASFKFFEATIDRKRYTNLKELLSSTIIYQSITGLYESRKRLDD

SEQ ID NO: 242 - protein, 1327 aa, Listeria monocytogenes
MKNPYTIGLDIGTNSVGWAVLTDQYDLVKRKMKVAGNSDKKQIKKNFWGVRLFDDGQTAVDRRMNRTARRRIERRRNRISYLQEIFAVEMANIDANFFCRLNDSFYVDSEKRNSRHPFFATIEEEVAYHKNYRTIYHLREELVNSSEKADLRLVYLALAHIIKYRGNFLIEGALDTKNTSVDEVYKQFIQTYNQVFMSNIEKVEENTEVASILAGKFTRREKFERILRLYPGEKSTGMFAQFISLIVGNKGNFQKVFNLVEKTDIECAKDSYEEDLEALLAIIGDEYAELFVAAKNTYNAVVLSSIITVTATETNAKLSASMIERFDAHEKELGELKAFIKLHLPKQYQEIFNNAEIDGYAGYIDGTKQVDFYKYLKTTLENVEGADYFITKIEEENFLRKQRTFDNGVIPHQLHLEELEAILHQQAKYYPFLREGYDKIKSLVTFRIPYFVGPLANGQSEFAWLTRKDDGEIRPWNIEEKVDFGKSAVDFIEKMTNKDTYLPKENVLPKHSLCYQKYMVYNELTKIRYIDDQGKTNYFSGREKQQIFNDLFKQKRKVKKKDLELFLRNINHIESPTIEGLEDSFNASYATYHDLLKVGLKQEILDNPLNTEILEDIVKILTVFEDKRMIKEQLEQFSDVLDGVVLKKLERRHYTGWGRLSAKLLVGIRDKQSHLTILDYLMDDGLNRNLMQLINDSNLSFKSIIEKEQVSTTDKDLQSIVADLAGSPAIKKGILQSLKIVDELVSIMGYPPQTIVVEMARENQTTGKGKNNSKPRYKSLEKAIKDFGSQILKEHPTDNQELKNNRLYLYYLQNGKDIYTGQELDIHNLSNYDIDHIVPQSFITDNSIDNLVLTSSAGNREKGGDVPPLEIVRKRKVFWEKLYQGNLMSKRKFDYLTKAERGGLTEADKARFIHRQLVETRQITKNVANILHQRFNKETDNHGNTMEQVRIVTLKSALVSQFRKQFQLYKVREVNDYHHAHDAYLNGVVANTLLKVYPQLEPEFVYGEYHQFDWFKANKATAKKQFYTNIMLFFAQKERIIDENGEILWDKKYLETIKKVLDYRQINIVKKTEIQKGEFSKATIKPKGNSSKLIPRKENWDPVKYGGLDSPNMAYAVIIEHAKGKKKIVIEKKLIQINIMERKMFEKDEEAFLEEKGYHQPKVLTKLPKYTLYECEKGRRRMLSSANEAQKGNQLVLSNHLVSLLYHAKNCEASDGKSLKYIEAHRETFSELLAQVSEFATKYTLADANLSKINNLFEQNKEGDIKAIAQSFVDLMAFNAMGAPASFKFFEATIDRKRYTNLKELLSSTIIYQSITGLYESRKRLDD

SEQ ID NO: 243 - protein, 1327 aa, Listeria monocytogenes
MKKPYTIGLDIGTNSVGWAVLTDQYDLVKRKMKISGDSEKKQIKKNFWGVRLFEKGETAAKRRMSRTARRRIERRRNRISYLQEIFAIQMNEVDDNFFNRLKESFYAESDKKYNRHPFFGTVEEEVAYYKDFPTIYHLRKELIDSQKKADLRLVYLALAHIIKYRGHFLIEGALDTKNTSIDEMFKQFLQIYNQVFANDIEKTEKNQEVAQILAEKFTRKDKLDKILSLYPGEKTTGVFAQFVNIIVGSTGKFKKHFNLHEKKDINCAEDTYDTDLESLLAIIGDEFAEVFVAAKNAYNAVVLSNIITVTDSTTRAKLSASLIERFENHKEDLKKMKRFVRTYLPEKYDEIFDDTEKHGYAGYISGTKQADFYKYMKATLEKIEGADYFIAKIEEENFLRKQRTFDNGVIPHQLHLEELEAILHQQAKYYPFLREDYEKIKSLVTFRIPYFVGPLAKGQSEFAWLTRKADGEIRPWNIEEKVDFGKSAVDFIEKMTNKDTYLPKENVLPKHSLCYQKYMVYNELTKVRYIDDQGKTNYFSGQEKQQIFNDLFKQKRKVKKKDLELFLRNINQIESPTIEGLEDSFNASYATYHDLLKVGMKQEILDNPLNTEMLEDIVKILTVFEDKRMIKEQLQQFSDVLDGTVLKKLERRHYTGWGRLSAKLLVGIRDKQSHLTILDYLMDDGLNRNLMQLINDSNLSFKSIIEKEQVSTTDKDLQSIVAELAGSPAIKKGILQSLKIVDELVSVMGYPPQTIVVEMARENQTTNKGKNNSKPRYKSLEKAIKEFGSQILKEHPTDNQELKNNRLYLYYLQNGKDMYTGQELDIHNLSNYDIDHIVPQSFITDNSVDNLVLTSSAGNREKGDNVPPLEIVQKRKIFWEKLYQGNLMSKRKFDYLTKAERGGLTEADKARFIHRQLVETRQITKNVANILHQRFNYKTDGNKDTMETVRIVTLKSALVSQFRKQFQFYKVREVNDYHHAHDAYLNGVVANTLLKVYPQLEPEFVYGEYHQFGWFKANKATAKKQFYTNIMLFFAQKDRIIDENGEILWDKRYLETVKKVLGYRQMNIVKKTEIQKGEFSNVTPNPKGKSNKLIPRKKDWDPIKYGGFDGSKMAYAIIIEYEKQKRKVRIEKKLIQINIMEREAFEKDEKTFLEEKGYHQPKVLIKVPKYTLYECKNGRRRMLGSANEAHKGNQMLLPNHLMALLYHAEKYEAIDGESLAYIEVHRALFDELLAYISEFARKYTLSNDRLDEINMLYERNKDGDVKSIAESFVSLKKFNAFGVHQDFSFFGTKIERKRDRKLNELLNSTIIYQSITGLYESRKRLDN

SEQ ID NO: 244 - protein, 1327 aa, Listeria monocytogenes
MKNPYTIGLDIGTNSVGWAVLTDQYDLVKRKMKVAGNSDKKQIKKNFWGVRLFDEGETAADRRMNRTARRRIERRRNRISYLQEIFALEMANIDANFFCRLNDSFYVDSEKRNSRHPFFATIEEEVAYHKNYRTIYHLREELVNSSEKADLRLVYLALAHIIKYRGNFLIEGALDTKNTSVDGVYKQFIQTYNQVFISNIEKMEENTTVADILAGKFTRKEKLERILQLYPGEKSTGMFAQFISLIVGSKGNFQKVFDLVEKTDIECAKDSYEEDLEALLAIIGDEYAELFVAAKNTYNAVVLSSIITVTDTETNAKLSASMIERFDAHEKDLSELKAFIKLHLPKQYEEIFSNVAIDGYAGYIDGTKQVDFYKYLKTLLENIEGADYFIAKIEEENFLRKQRTFDNGAIPHQLHLEELEAILHQQAKYYPFLKEAYDKIKSLVTFRIPYFVGPLANGQSDFAWLTRKADGEIRPWNIEEKVDFGKSAVDFIEKMTNKDTYLPKENVLPKHSLYYQKYMVYNELTKVRYIDDQGKTNYFSGQEKQQIFNDYFKQKRKVSKKDLEQFLRNMSHIESPTIEGLEDSFNSSYATYHDLLKVGIKQEVLENPLNTEMLEDIVKILTVFEDKRMIKEQLQQFSDVLDGAVLKKLERRHYTGWGRLSAKLLVGIRDKQSHLTILDYLMDDGLNRNLMQLINDSNLSFKSIIEKEQVSTTDKDLQSIVADLAGSPAIKKGILQSLKIVDELVSIMGYPPQTIVVEMARENQTTVKGKNNSRPRYKSLEKAIKEFGSQILKEHPTDNQELRNNRLYLYYLQNGKDMYTGQELDIHNLSNYDIDHIVPQSFITDNSIDNLVLTSSAGNREKGDDVPPLEIVRKRKVFWEKLFQGNLMSKRKFDYLTKAERGGLTEADKATFIHRQLVETRQITKNVANILHQRFNNETDNHGNNMEQVRIVMLKSALVSQFRKQFQLYKVREVNDYHHAHDAYLNGVVANTLLKVYPQLEPEFVYGEYHQFDWFKANKATAKKQFYTNIMLFFAQKERIIDENGEILWDKKYLETIKKVLDYRQMNIVKKTEIQKGEFSKATIKPKGNSSKLIPRKENWDPMKYGGLDSPNMAYAVIIEHAKGKKKVVFEKKIIRITIMERKAFEKDEKSFLEKQGYRQPKVLTKLPKYTLYECENGRRRMLASANEAQKGNQQVLKGQLITLLHHAKNCEASDGKSLDYIESNREMFGELLAHVSEFAKRYTLADANLSKINQLFEQNKDNDIKVIAQSFVNLMAFNAMGAPASFKFFEATIERKRYTNLKELLSATIIYQSITGLYEARKRLDG

SEQ ID NO: 245 - protein, 1327 aa, Listeria monocytogenes
MKNPYTIGLDIGTNSVGWAVLTNQYDLVKRKMKVAGNSDKKQIKKNFWGVRLFDDGQTAVDRRMNRTARRRIERRRNRISYLQEIFAVEMANIDANFFCRLNDSFYVDSEKRNSRHPFFATIEEEVAYHKNYRTIYHLREELVNSSEKADLRLVYLALAHIIKYRGNFLIEGALDTKNTSVDGVYEQFIQTYNQVFMSNIEKVEENIEVANILAGKFTRREKFERILQLYPGEKSTGMFAQFISLIVGSKGNFQKVFDLIEKTDIECAKDSYEEDLEALLAIIGDEYAELFVAAKNTYNAVVLSSIITVTATETNAKLSASMIERFDAHEKDLGELKAFIKLHLPKQYQEIFNNAAIDGYAGYIDGTKQVDFYKYLKTILENIEGADYFIAKIEEENFLRKQRTFDNGAIPHQLHLEELEAIIHQQAKYYPFLREDYEKIKSLVTFRIPYFVGPLAKGQSEFAWLTRKADGEIRPWNIEEKVDFGKSAVDFIEKMTNKDTYLPKENVLPKHSLCYQKYMVYNELTKVRYIDDQGKTNYFSGQEKQQIFNDLFKQKRKVKKKDLELFLRNINHIESPTIEGLEDSFNASYATYHDLLKVGMKQEILDNPLNTEMLEDIVKILTVFEDKPMIKEQLQQFSDVLDGGVLKKLERRHYTGWGRLSAKLLVGIREKQSHLTILDYLMDDGLNRNLMQLINDSNLSFKSIIEKEQVSTTDKDLQSIVADLAGSPAIKKGILQSLKIVDELVSIMGYPPQTIVVEMARENQTTGKGKNNSKPRYKSLEKAIKEFGSKILKEHPTDNQELKNNRLYLYYLQNGKDMYTGQELDIHNLSNYDIDHIVPQSFITDNSIDNLVLTSSAGNREKGGDVPPLEIVRKRKVFWEKLYQGNLMSKRKFDYLTKAERGGLTDADKARFIHRQLVETRQITKNVANILHQRFNNETDNHGNTMEQVRIVTLKSALVSQFRKQFQLYKVREVNDYHHAHDAYLNGVVANTLLKVYPQLEPEFVYGEYHQFDWFKANKATAKKQFYTNIMLFFGQKERIIDENGEILWDKKYLETIKKVLDYRQMNIVKKTEIQKGEFSKATIKPKGNSSKLIPRKENWDPMKYGGLDSPNMAYAVIIEHAKGKKKLIFEKKIIRITIMERKMFEKDEEAFLEEKGYRHPKVLTKLPKYTLYECEKGRRRMLASANEAQKGNQLVLSNHLVSLLYHAKNCEASDGKSLKYIEAHRETFSELLAQVSEFATRYTLADANLSKINNLFEQNKEGDIQAIAQSFVDLMAFNAMGAPASFKFFEATIDRKRYTNLKELLSSTIIYQSITGLYESRKRLDD

SEQ ID NO: 246 - protein, 1327 aa, Listeria monocytogenes
MKNPYTIGLDIGTNSVGWAVLTNQYDLVKRKMKVAGNSDKKQIKKNFWGVRLFDDGQTAVDRRMNRTARRRIERRRNRISYLQEIFAVEMANIDANFFCRLNDSFYVDSEKRNSRHPFFATIEEEVAYHKNYRTIYHLREELVNSSEKADLRLVYLALAHIIKYRGNFLIEGALDTKNTSVDGVYEQFILTYNQVFMSNIEKVEENIEVANILAGKFTRREKFERILQLYPGEKSTGMFAQFISLIVGSKGNFQKVFDLIEKTDIECAKDSYEEDLETLLAIIGDEYAELFVAAKNTYNAVVLSSIITVTDTETNAKLSASMIERFDAHEKDLVELKAFIKLNLPKQYEEIFSNAAIDGYAGYIDGTKQVDFYKYLKTTLENVEGADYFITKIEEENFLRKQRTFDNGVIPHQLHLEELEAILHQQAKYYPFLREDYEKIKSLVTFRIPYFVGPLAKGQSEFAWLTRKADGEIRPWNIEEKVDFGKSAVDFIEKMTNKDTYLPKENVLPKHSLCYQKYMVYNELTKIRYIDDQGKTNYFSGQEKQQIFNDLFKQKRKVKKKDLELFLRNINHVESPTIEGLEDSFNASYATYHDLMKVGIKQEILDNPLNTEMLEDIVKILTVFEDKRMIKEQLQQFSDVLDGTVLKKLERRHYTGWGRLSAKLLVGIRDKQSHLTILDYLMDDGLNRNLMQLINDSNLSFKSIIEKEQVSTADKDLQSIVADLAGSPAIKKGILQSLKVVEELVSVMGYPPQTIVVEMARENQTTNKGKNNSKPRYKSLEKAIKEFGSQILKEHPTDNQELKNNRLYLYYLQNGKDMYTGQELDIHNLSNYDIDHIVPQSFITDNSIDNLVLTSSAGNREKGDNVPPLEIVQKRKIFWEKLYQGNLMSKRKFDYLTKAERGGLTEADKARFIHRQLVETRQITKNVANILHQRFNYKTDDNEDTMEPVRIVTLKSALVSQFRKQFQLYKVREVNDYHHAHDAYLNGVVANTLLKVYPQLEPEFVYGEYHQFDWFKANKATAKKQFYTNIMLFFAQKERIIDENGEILWDKKYLETIKKVLNYRQMNIVKKTEIQKGEFSNQNPKPRGDSSKLIPKKTNLNPIKYGGFEGSNMAYAIIIEHEKRKKKVTIEKKLIQINIMERKAFEKDEKVFLEGKGYHQPKVLTKLPKYALYECENGRRRMLGSANEVHKGNQMLLPNHLMTLLYHAEKREAIDGESLAYIEAHKAVFGELLAHISEFARKYTLANDKLDEINMLYERNKDGDVKSIAESFVSLKKFNAFGVHKDFNFFGTTIKRKRDRKLKELLNSTIIYQSITGLYESRKRLDS

SEQ ID NO: 247 - protein, 1327 aa, Listeria monocytogenes
MKNPYTIGLDIGTNSVGWAVLTDQYDLVKRKMKVAGNSDKKQIKKNFWGVRLFDDGQTAVDRRMNRTARRRIERRRNRISYLQEIFAVEMANIDANFFCRLNDSFYVDSEKRNSRHPFFATIEEEVAYHKNYRTIYHLREELVNSSEKADLRLVYLALAHIIKYRGNFLIEGALDTKNTSVDGVYEQFIQTYNQVFMSNIEKVEENIEVANILAGKFTRREKFERILQLYPGEKSTGMFAQFISLIVGSKGNFQKVFDLIEKTDIECAKDSYEEDLETLLAIIGDEYAELFVAAKNTYNAVVLSSIITVNDTETNAKLSASMIERFDAHEKDLVELKAFIKLNLPKQYEEIFSNAAIDGYAGYIDGTKQVDFYKYLKTILENIEGSDYFIAKIEEENFLRKQRTFDNGAIPHQLHLEELEAIIHQQAKYYTFLKEDYDKIKSLVTFRIPYFVGPLANGQSEFAWLTRKADGEIRPWNIEEKVDFGKSAVDFIEKMTNKDTYLPKENVLPKHSLCYQKYMVYNELTKVRYIDDQGKTNYFSGQEKQQIFNDLFKQKRKVKKKDLELFLRNINQIESPTIEGLEDSFNASYATYHDLLKVGMKQEILDNPLNTEMLEDIVKILTVFEDKRMIKEQLQQFSDVLDGVVLKKLERRHYTGWGRLSAKLLVGIRDKQSHLTILEYLMDDGLNRNLMQLINDSNLSFKSIIEKEQVSTTDKDLQSIVAELAGSPAIKKGILQSLKIVDELVSIMGYPPQTIVVEMARENQTTGKGKNNSKPRYKSLEKAIKEFGSQILKEHPTDNQELKNNRLYLYYLQNGKDMYTGQELDIHNLSNYDIDHIVPQSFITDNSIDNLVLTSSAGNREKGGDVPPLEIVRKRKVFWEKLYQGNLMSKRKFDYLTKAERGGLTEADKARFIHRQLVETRQITKNVANILHQRFNKETDNHGNTMEQVRIVTLKSALVSQFRKQFQLYKVREVNDYHHAHDAYLNGVVANTLLKVYPQLEPEFVYGEYHQFDWFKANKATAKKQFYTNIMLFFAQKERIIDENGEILWDKKYLETIKKVLDYRQMNIVKKTEIQKGEFSKATIKPKGNSSKLIPRKENWDPMKYGGLDSPNMAYAVIIEHAKGKKRIVIEKKLIQINIMERKMFEKDEEAFLEEKGYRHPKVLTKLPKYTLYECEKGRRRMLASANEAQKGNQLVLSNHLVSLLYHAKNCEASDGKSLKYIEAHRETFSELLAQVSEFATRYTLADANLSKINNLFEQNKEGDIKAIAQSFVDLMAFNAMGAPASFKFFEATIDRKRYTNLKELLSSTIIYQSITGLYESRKRLDD

SEQ ID NO: 248 - protein, 1327 aa, Listeria monocytogenes
MKKPYTIGLDIGTNSVGWAVLTDQYDLVKRKMKISGDSEKKQIKKNFWGVRLFEKGETAAKRRMSRTARRRIERRRNRISYLQEIFAIQMNEVDDNFFNRLKESFYAESDKKYNRHPFFGTVEEEVAYYKDFPTIYHLRKELIDSQKKADLRLVYLALAHIIKYRGHFLIEGALDTKNTSIDEMFKQFLQIYNQVFANDIEKTEKNQEVAQILAEKFTRKDKLDKILSLYPGEKTTGVFAQFVNIIVGSTGKFKKHFNLHEKKDINCAEDTYDTDLESLLAIIGDEFAEVFVAAKNAYNAVVLSNIITVTDSTTRAKLSASLIERFENHKEDLKKMKRFVRTYLPEKYDEIFDDTEKHGYAGYISGTKQADFYKYMKATLEKIEGADYFIAKIEEENFLRKQRTFDNGVIPHQLHLEELEAILHQQAKYYPFLREDYEKIKSLVTFRIPYFVGPLAKGQSEFAWLTRKADGEIRPWNIEEKVDFGKSAVDFIEKMTNKDTYLPKENVLPKHSLCYQKYMVYNELTKVRYIDDQGKTNYFSGQEKQQIFNDLFKQKRKVKKKDLELFLRNINQIESPTIEGLEDSFNASYATYHDLLKVGMKQEILDNPLNTEMLEDIVKILTVFEDKRMIKEQLQQFSDVLDGTVLKKLERRHYTGWGRLSAKLLVGIRDKQSHLTILDYLMDDGLNRNLMQLINDSNLSFKSIIEKEQVSTADKDLQSIVADLAGSPAIKKGILQSLKIVDELVSVMGYPPQTIVVEMARENQTTNKGKNNSKPRYKSLEKAIKEFGSQILKEHPTDNQELKNNRLYLYYLQNGKDMYTGQELDIHNLSNYDIDHIVPQSFITDNSVDNLVLTSSAGNREKGDNVPPLEIVQKRKIFWEKLYQGNLMSKRKFDYLTKAERGGLTEADKARFIHRQLVETRQITKNVANILHQRFNYKTDGNKDTMETVRIVTLKSALVSQFRKQFQFYKVREVNDYHHAHDAYLNGVVANTLLKVYPQLEPEFVYGEYHQFDWFKANKATAKKQFYTNIMLFFAQKDRIIDENGEILWDKRYLETVKKVLGYRQMNIVKKTEIQKGEFSNVTPNPKGKSNKLIPRKKDWDPIKYGGFDGSKMAYAIIIEYEKQKRKVRIEKKLIQINIMEREAFEKDEKTFLEEKGYHQPKVLIKVPKYTLYECENGRRRMLGSANEAHKGNQMLLPNHLMALLYHAEKYEAIDGESLAYIEVHRALFDELLAYISEFARKYTLSNDRLDEINMLYERNKDGDVKSIAESFVSLKKFNAFGVHQDFSFFGTKIERKRDRKLNELLNSTIIYQSITGLYESRKRLDN

SEQ ID NO: 249 - protein, 1327 aa, Listeria monocytogenes
MKNPYTIGLDIGTNSVGWAVLTNQYDLVKRKMKVAGNSDKKQIKKNFWGVRLFDDGQTAVDRRMNRTARRRIERRRNRISYLQEIFAVEMANIDANFFCRLNDSFYVDSEKRNSRHPFFATIEEEVAYHKNYRTIYHLREELVNSSEKADLRLVYLALAHIIKYRGNFLIEGALDTKNTSVDGVYEQFIQTYNQVFMSNIEKVEENIEVANILARKFTRREKFERILQLYPGEKSTGMFAQFISLIVGSKGNFQKVFDLIEKTDIECAKDSYEEDLETLLAIIGDEYAELFVAAKNTYNAVVLSSIITVTDTETNAKLSASMIERFDAHEKDLVELKAFIKLNLPKQYEEIFSNAAIDGYAGYIDGTKQVDFYKYLKTILENIEGADYFIAKIEEENFLRKQRTFDNGAIPHQLHLEELEAIIHQQAKYYPFLREDYEKIKSLVTFRIPYFVGPLAKGQSEFAWLTRKADGEIRPWNIEEKVDFGKSAVDFIEKMTNKDTYLPKENVLPKHSLCYQKYMVYNELTKIRYIDDQGKTNYFSGQEKQQIFNDLFKQKRKVKKKDLELFLRNINHVESPTIEGLEDSFNASYATYHDLMKVGIKQEILDNPLNTEMLEDIVKILTVFEDKRMIKEQLQQFSDVLDGTVLKKLERRHYTGWGRLSAKLLVGIRDKQSHLTILDYLMDDGLNRNLMQLINDSNLSFKSIIEKEQVSTADKDLQSIVADLAGSPAIKKGILQSLKVVEELVSVMGYPPQTIVVEMARENQTTNKGKNNSKPRYKSLEKAIKEFGSQILKEHPTDNQELKNNRLYLYYLQNGKDMYTGQELDIHNLSNYDIDHIVPQSFITDNSIDNLVLTSSAGNREKGDNVPPLEIVQKRKIFWEKLYQGNLMSKRKFDYLTKAERGGLTEADKARFIHRQLVETRQITKNVANILHQRFNYKTDDNEDTMEPVRIVTLKSALVSQFRKQFQLYKVREVNDYHHAHDAYLNGVVANTLLKVYPQLEPEFVYGEYHQFDWFKANKATAKKQFYTNIMLFFAQKERIIDENGEILWDKKYLETIKKVLNYRQMNIVKKTEIQKGEFSNQNPKPRGDSSKLIPKKTNLNPIKYGGFEGSNMAYAIIIEHEKRKKKVTIEKKLIQINIMERKAFEKDEKVFLEGKGYHQPKVLTKLPKYALYECENGRRRMLGSANEVHKGNQMLLPNHLMTLLYHAEKREAIDGESLAYIEAHKAVFGELLAHISEFARKYTLANDKLDEINMLYERNKDGDVKSIAESFVSLKKFNAFGVHKDFNFFGTTIKRKRDRKLKELLNSTIIYQSITGLYESRKRLDS

SEQ ID NO: 250 - protein, 1327 aa, Listeria monocytogenes; identical to SEQ ID NO: 245

SEQ ID NO: 251 - protein, 1327 aa, Listeria monocytogenes; identical to SEQ ID NO: 249

SEQ ID NO: 252 - protein, 781 aa, Listeria monocytogenes
  SITE 721: note = misc_feature - Xaa can be any naturally occurring amino acid
IFNDLFKQKRKVKKKDLELFLRNINQIESPTIEGLEDSFNASYATYHDLLKVGMKQEILDNPLNTEMLEDIVKILTVFEDKRMIKEQLQQFSDVLDGVVLKKLERRHYTGWGRLSAKLLVGIRDKQSHLTILEYLMDDGLNRNLMQLINDSNLSFKSIIEKEQVSTTDKDLQSIVADLAGSPAIKKGILQSLKIVDELVSIMGYPPQTIVVEMARENQTTVKGKNNSRPRYKSLEKAIKEFGSQILKEHPTDNQELKNNRLYLYYLQNGKDIYTGQELDIHNLSNYDIDHIVPQSFITDNSIDNLVLTSSAGNREKGDDVPPLEIVRKRKVFWEKLYQGNLMSKRKFDYLTKAERGGLTEADKARFIHRQLVETRQITKNVANILHQRFNNETDNHGNTMEQVRIVTLKSALVSQFRKQFQLYKVREVNDYHHAHDAYLNGVVANTLLKVYPQLEPEFVYGEYHQFDWFKANKATAKKQFYTNIMLFFAQKERIIDENGEILWDKKYLETIKKVLDYRQMNIVKKTEIQKGEFSKATIKPKGNSSKLIPRKENWDPMKYGGLDSPNMAYAVIIEHAKGKKKIVIEKKLIQINIMERKMFEKDEEAFLEEKGYRHPKVLTKLPKYTLYECEKGRRRMLASANEAQKGNQLVLSNHLVSLLYHAKNCEASDGKSLKYTEAHRETFSELLAQVSEFATRYTLADANLSKINNLFEQNKEGDIKXIAQSFVDLMVFNAMGAPASFKFFEATIDRKRYTNLKELLSSTIIYQSITGLYESRKRLDD

SEQ ID NO: 253 - protein, 1327 aa, Listeria seeligeri
MKKPYTIGLDIGTNSVGWAALTDQYDLVKRKMKVAGNSEKKQIKKNLWGVRLVDEGKTAAHRRVNRTTRRRIERRRNRISYLQEIFTAEMFEVDANFFYRLEDSFYIESEKRQSRHPFFATIEEEVAYHENYRTIYHLREKLVNSSDKADLRLVYLALAHIIKYRGNFLIEGKLDTKNTSVDEVFKQFIKTYNQVFASDIERIEENNEVAKIFSEKLTKREKLDKILNLYPNEKSTDLFAQFISLIIGSKGNFKKFFNLTEKTDIECAKDSYEEDLEVLLARVGDEYAEIFVAAKNAYNAVVLSSIITVSNTETKAKLSASMIERFDKHDKDLKRMKAFFKVRLPENFNEVFNDVEKDGYAGYIEGTKQEAFYKYMKKMLEHVEGADYFINQIEEENFLRKQRTFDNGAIPHQLHLEELEAILHQQAKYYPFLKVDYEKIKSLVTFRIPYFVGPLANGQSEFSWLTRKADGEIRPWNIEEKVDFGKSAIDFIEKMTNKDTYLPKENVLPKHSMCYQKYMVYNELTKIRYTDDQGKTHYFSGQEKQQIFNDLFKQKRKVKKKDLELFLYNMNHVESPTVEGVEDAFNSSFTTYHDLQKVGVPQEILDDPLNTEMLEEIIKILTVFEDKRMINERLQEFSNVLDEAVLKKLERRHYTGWGRLSAKLLIGIRDKESHLTILDYLMDDKHNRNLMQLINDSNLSFKSIIEKEQVSTADKDIQSIVADLAGSPAIKKGILQSLKIVDELVGIMGYPPQTIVVEMARENQTTGKGKNNSKPRFTSLEKAIKELGSQILKEHPTDNQGLKNDRLYLYYLQNGKDMYTGQELDIHNLSNYDIDHVVPQSFITDNSIDNRVLASSAANREKGDNVPSLEVVRKRKVYWEKLYQAKLMSKRKFDYLTKAERGGLTEADKARFIHRQLVETRQITKNVANILHQRFNCKKDESGNVIEQVRIVTLKAALVSQFRKQFQLYKVREVNDYHHAHDAYLNCVVANTLLKVYPQLEPEFVYGDYHQFDWFKANKATAKKQFYTNIMLFFAKKDRIIDENGEILWDKKYLDTIKKVLNYRQMNIVKKTEIQKGEFSNATANPKGNSSKLIPRKADWDPIKYGGFDGSNMAYAIVIEHEKRKKKTVIKKELIQINIMERTAFEKDQKEFLEGKGYRNPKVITKIPKYTLYECENGRRRMLGSANEAQKGNQMVLPNHLMTLLYHAKNCEASDGKSLAYIESHREMFAELLDSISEFASRYTLADANLEKINTIFEQNKSGDVKVIAQSFVNLLEFNAMGAPASFKYFETNIERKRYNNLKELLNATIIYQSITGLYEARKRLDD

SEQ ID NO: 254 - protein, 1359 aa, synthetic construct; identical to SEQ ID NO: 228
  REGION 1..1359: note = Synthetic Polypeptide

SEQ ID NO: 255 - protein, 1290 aa, Roseburia hominis
IVDYCIGLDLGTGSVGWAVVDMNHRLMKRNGKHLWGSRLFSNAETAATRRSSRSIRRRYNKRRERIRLLRAILQDMVLEKDPTFFIRLEHTSFLDEEDKAKYLGDNYNLFIDEDFNDYTYYHKYPTIYHLRKALCESTEKADPRLIYLALHHIVKYRGNFLYEGQKFNMDASNIEDKLSDVFTQFADFNNIPYEDDKKNLEILEILKKPLSKKAKVDEVMALISPEKEFKSAYKELVTGIAGNKMNVTKMILCESIKQGDSEIKLKFSDSNYDDQFSEVENDLGEYVEFIDSLHNIYSWVELQTIMGATHTDNASISEAMVSRYNKHHEDLQLLKKCIKDNVPKKYFDMFRNDSEKVKGYYNYINRKAPVDEFYKFVKKCIEKVDTPEAKQILHDIELENFLLKQNSRTNGSVPYQMQLDEMIKIIDNQAKYYPVLKEKREQLLSILTFRIPYYFGPLETSEHAWIKRLEGKENQRILPWNYQDTVDVDATAEGFIKRMRSYCTYFPDEEVLPKNSLIVSKYEVYNELNKIRVDDKLLEVDVKNDIYNELFMKNKTVTEKKLKNWLVNNQCCRKDAEIKGFQKENQFSTSLTPWIDFTNIFGKIDQSNFDLIEKIIYDLTVFEDKKIMKRRLKKKYALPDDKIKQILKLKYKDWSRLSKKLLDGIVADSVTVLDVLESRLNLMEIINDKELGYAQMIEEASSCPKDGKFTYEEVAKLAGSPALKRGIWQSLQIVEEITKVMKCRPKYIYIEFERSEEKERTESKIKKLENVYKDEQTSVLEELKGFDNTKKISSDSLFLYFTQLGKCMYSGKKLDIDSLDKYQIDHIVPQSLVKDDSFDNRVLVLPSENQRKLDDLVVPFDIRDKMYRFWKLLFDHELISPKKFYSLIKTEYTERDEERFINRQLVETRQITKNVTQIIEDHYSTTKVAAIRANLSHEFRVKNHIYKNRDINDYHHAHDAYIVALIGGFMRDRYPNMHDSKAVYSEYMKMFRNKNDQKGFVINSMNYPYEVDGKLIWNPDLINEIKKCFYYKDCYCTTKLDQKSGQMFNTVLPNDAHSAKGAVIPVNKNRKDVNKYGGFSGLQYVIAAIEGTKKKGKKLVKVRKLSGIPLYLKQADIKEQIEYVEKEEKLSDVKIIKNNIPLNQLIEIDGRQYLLTSECVNAMQLVLNEEQCKLIADIYNAIYKQDFDGLDNMLMIQLYLQLIDKLKTLYPIYMGIVEKFEKFVSISKEEKANVIQMLIIMHKGPQNGNIIYDDFNVGKRIGRLNGRTFYLNIEFISQSPTGIYTKKYKL

SEQ ID NO: 256 - protein, 1292 aa, Sharpea azabuensis
KDIRYSIGLDIGTNSVGWAVMDEHYELLKKGNHHMWGSRLFDAAEPAATRRASRSIRRRYNKRRERIRLLRDLLGDMVMEVDPTFFIRLLNVSFLDEEDKQKNLGDNYNLFIEKDFNDKTYYDKYPTIYHLRKELCENKEKADPRLIYLALHHIVKYRGNFLYEGQSFTMDNSDIEERLNSAIEKFMSINEFDNRIVSDINSMIAVLSKIYQRSKKADDLLKIMNPTKEEKAAYKEFTKALVGLKFNISKMILAQEVKKGDTDIVLEFSNANYDSTIDELQSELGEYIEFIEMLHNIYSWVELQAILGATHTDNPSISAAMVERYEEHKKDLRVLKKVIREELPDKYNEVFRKDNRKLHNYLGYIKYDTPVEEFYKYIKGLLAKVDTDEAREILERIDLEKFMLKQNSRTNGSIPYQMQKDEMIQIIDNQSVYYPQLKENRDKLISILEFRIPYYFGPLAHSEFAWIKKFEDKQKERILPWNYDQIVDIDATAEGFIERMKNTGTYFPDEPVMAKNSLTVSKFEVLNELNKIRINGKLIAVETKKELLSDLFMKNKTITDKKLKDWLVTHQYYDINEELKIEGYQKDLQFSTSLAPWIDFTKIFGEINASNYQLIEKIIYDISIFEDKKILKRRLKKVYQLDDLLVDKILKLNYTGWSRLSEKLLTGMTADKATVLFVLESNKNLMEIINDEKLGYKQIIEESNMQDIEGPFKYDEVKKLAGSPAIKRGIWQALLVVREITKFMKHEPSHIYIEFAREEQKVRKESKIAKLQKIYENLQTQVYESLKKEDAKKRMETDALYLYYLQMGKSMYSGKPLDIDKLSTYQIDHILPQSLIKDDSFDNRVLVLPEENQWKLDSETVPFEIRNKMIGFWQMLHENGLMSNKKFFSLIRTDFSDKDKERFINRQLVETRQIIKNVAVIINDHYTNTNIVTVRAELSHQFRERYKIYKNRDINDFHHAHDAYIACIVGQFMHQNFEHLDAKIIYGQYKKNYKKNYGFILNSMNHLQSDIDTGEVMWDPAKIGKIKSCFYYKDVYVTKKLEQNSGTLFNTVLPNDAHSEKGATVPLNKYRADVHKYGGFGNVQSIIVAIEGKKKKGKKLIDVRKLTSIPLHLKNAPVEEQLSYIASPEHEDLIDVRIVKEILKNQLIEIDGGLYYVTSEYVTARQLSLNEQSCKLISEIYAAMLKKRYEYLDEEEIFDLYLQLLQKMDTLYPAYKGIAKRFFDFKNIDVVEKCDVIQILIIMHAGPMNGNIMYDDFKFTNRIGRFTHKNIDLKTTFISTSVTGLFSKKYKL

SEQ ID NO: 257 - protein, 1359 aa, synthetic construct; identical to SEQ ID NO: 228
  REGION 1..1359: note = Synthetic Polypeptide

SEQ ID NO: 258 - protein, 1359 aa, synthetic construct
  REGION 1..1359: note = Synthetic Polypeptide
MDKKYSIGLAIGTNSVGWAVITDEYKVPSKKFKVLGNTDRHSIKKNLIGALLFDSGETAEATRLKRTARRRYTRRKNRICYLQEIFSNEMAKVDDSFFHRLEESFLVEEDKKHERHPIFGNIVDEVAYHEKYPTIYHLRKKLVDSTDKADLRLIYLALAHMIKFRGHFLIEGDLNPDNSDVDKLFIQLVQTYNQLFEENINASGVDAKAILSARLSKSRRLENLIAQLPGEKKNGLFGNLIALSLGLTPNFKSNFDLAEDAKLQLSKDTYDDDLDNLLAQIGDQYADLFLAAKNLSDAILLSDILRVNTEITKAPLSASMIKRYDEHHQDLTLLKALVRQQLPEKYKEIFFDQSKNGYAGYIDGGASQEEFYKFIKPILEKMDGTEELLVKLNREDLLRKQRTFDNGSIPHQIHLGELHAILRRQEDFYPFLKDNREKIEKILTFRIPYYVGPLARGNSRFAWMTRKSEETITPWNFEEVVDKGASAQSFIERMTNFDKNLPNEKVLPKHSLLYEYFTVYNELTKVKYVTEGMRKPAFLSGEQKKAIVDLLFKTNRKVTVKQLKEDYFKKIECFDSVEISGVEDRFNASLGTYHDLLKIIKDKDFLDNEENEDILEDIVLTLTLFEDREMIEERLKTYAHLFDDKVMKQLKRRRYTGWGRLSRKLINGIRDKQSGKTILDFLKDGFANRNFMQLIHDDSLTFKEDIQKAQVSGQGDSLHEHIANLAGSPAIKKGILQTVKVVDELVKVMGRHKPENIVIEMARENQTTQKGQKNSRERMKRIEEGIKELGSQILKEHPVENTQLQNEKLYLYYLQNGRDMYVDQELDINRLSDYDVDAIVPQSFLKDDSIDNKVLTRSDKNRGKSDNVPSEEVVKKMKNYWRQLLNAKLITQRKFDNLTKAERGGLSELDKAGFIKRQLVETRQITKHVAQILDSRMNTKYDENDKLIREVKVITLKSKLVSDFRKDFQFYKVREINNYHHAHDAYLNAVVGTALIKKYPKLESEFVYGDYKVYDVSEQEIGKATAKYFFYSNIMNFFKTEITLANGEIRKRPLIETNGETGEIVWDKGRDFATVRKVLSMPQVNIVKKTEVQTGGFSKESILPKRNSDKLIARKKDWDPKKYGGFDSPTVAYSVLVVAKVEKGKSKKLKSVKELLGITIMERSSFEKNPIDFLEAKGYKEVKKDLIIKLPKYSLFELENGRKRMLASGELQKGNELALPSKYVNFLYLASHYEKLKGSPEDNEQKQLFVEQHKHYLDEIIEQISEFSKRVILADANLDKVLSAYNKHRDKPIREQAENIIHLFTLTNLGAPAAFKYFDTTIDRKRYTSTKEVLDATLIHQSITGLYETRIDLSQLGGD

SEQ ID NO: 259 - protein, 1359 aa, synthetic construct; identical to SEQ ID NO: 11
  REGION 1..1359: note = Synthetic Polypeptide

SEQ ID NO: 260 - protein, 1359 aa, synthetic construct; identical to SEQ ID NO: 258
  REGION 1..1359: note = Synthetic Polypeptide

SEQ ID NO: 261-269 - skipped (9 entries)

SEQ ID NO: 270 - protein, 198 aa, Homo sapiens [sequence omitted]

SEQ ID NO: 271 - protein, 198 aa, Mus musculus
MDSLLMKQKKFLYHFKNVRWAKGRHETYLCYVVKRRDSATSCSLDFGHLRNKSGCHVELLFLRYISDWDLDPGRCYRVTWFTSWSPCYDCARHVAEFLRWNPNLSLRIFTARLYFCEDRKAEPEGLRRLHRAGVQIGIMTFKDYFYCWNTFVENRERTFKAWEGLHENSVRLTRQLRRILLPLYEVDDLRDAFRMLGF

SEQ ID NO: 272 - protein, 198 aa, Canis lupus
MDSLLMKQRKFLYHFKNVRWAKGRHETYLCYVVKRRDSATSFSLDFGHLRNKSGCHVELLFLRYISDWDLDPGRCYRVTWFTSWSPCYDCARHVADFLRGYPNLSLRIFAARLYFCEDRKAEPEGLRRLHRAGVQIAIMTFKDYFYCWNTFVENREKTFKAWEGLHENSVRLSRQLRRILLPLYEVDDLRDAFRTLGL

SEQ ID NO: 273 - protein, 199 aa, Bos taurus
MDSLLKKQRQFLYQFKNVRWAKGRHETYLCYVVKRRDSPTSFSLDFGHLRNKAGCHVELLFLRYISDWDLDPGRCYRVTWFTSWSPCYDCARHVADFLRGYPNLSLRIFTARLYFCDKERKAEPEGLRRLHRAGVQIAIMTFKDYFYCWNTFVENHERTFKAWEGLHENSVRLSRQLRRILLPLYEVDDLRDAFRTLGL

SEQ ID NO: 274 - protein, 429 aa, Mus musculus
MGPFCLGCSHRKCYSPIRNLISQETFKFHFKNLGYAKGRKDTFLCYEVTRKDCDSPVSLHHGVFKNKDNIHAEICFLYWFHDKVLKVLSPREEFKITWYMSWSPCFECAEQIVRFLATHHNLSLDIFSSRLYNVQDPETQQNLCRLVQEGAQVAAMDLYEFKKCWKKFVDNGGRRFRPWKRLLTNFRYQDSKLQEILRPCYIPVPSSSSSTLSNICLTKGLPETRFCVEGRRMDPLSEEEFYSQFYNQRVKHLCYYHRMKPYLCYQLEQFNGQAPLKGCLLSEKGKQHAEILFLDKIRSMELSQVTITCYLTWSPCPNCAWQLAAFKRDRPDLILHIYTSRLYFHWKRPFQKGLCSLWQSGILVDVMDLPQFTDCWTNFVNPKRPFWPWKGLEIISRRTQRRLRRIKESWGLQDLVNDFGNLQLGPPMS

SEQ ID NO: 275 - protein, 429 aa, Rattus rattus
MGPFCLGCSHRKCYSPIRNLISQETFKFHFKNLRYAIDRKDTFLCYEVTRKDCDSPVSLHHGVFKNKDNIHAEICFLYWFHDKVLKVLSPREEFKITWYMSWSPCFECAEQVLRFLATHHNLSLDIFSSRLYNIRDPENQQNLCRLVQEGAQVAAMDLYEFKKCWKKFVDNGGRRFRPWKKLLTNFRYQDSKLQEILRPCYIPVPSSSSSTLSNICLTKGLPETRFCVERRRVHLLSEEEFYSQFYNQRVKHLCYYHGVKPYLCYQLEQFNGQAPLKGCLLSEKGKQHAEILFLDKIRSMELSQVIITCYLTWSPCPNCAWQLAAFKRDRPDLILHIYTSRLYFHWKRPFQKGLCSLWQSGILVDVMDLPQFTDCWTNFVNPKRPFWPWKGLEIISRRTQRRLHRIKESWGLQDLVNDFGNLQLGPPMS

SEQ ID NO: 276 - protein, 370 aa, Macaca mulatta
MVEPMDPRTFVSNFNNRPILSGLNTVWLCCEVKTKDPSGPPLDAKIFQGKVYSKAKYHPEMRFLRWFHKWRQLHHDQEYKVTWYVSWSPCTRCANSVATFLAKDPKVTLTIFVARLYYFWKPDYQQALRILCQKRGGPHATMKIMNYNEFQDCWNKFVDGRGKPFKPRNNLPKHYTLLQATLGELLRHLMDPGTFTSNFNNKPWVSGQHETYLCYKVERLHNDTWVPLNQHRGFLRNQAPNIHGFPKGRHAELCFLDLIPFWKLDGQQYRVTCFTSWSPCFSCAQEMAKFISNNEHVSLCIFAARIYDDQGRYQEGLRALHRDGAKIAMMNYSEFEYCWDTFVDRQGRPFQPWDGLDEHSQALSGRLRAI

SEQ ID NO: 277 - protein, 384 aa, Pan troglodytes
MKPHFRNPVERMYQDTFSDNFYNRPILSHRNTVWLCYEVKTKGPSRPPLDAKIFRGQVYSKLKYHPEMRFFHWFSKWRKLHRDQEYEVTWYISWSPCTKCTRDVATFLAEDPKVTLTIFVARLYYFWDPDYQEALRSLCQKRDGPRATMKIMNYDEFQHCWSKFVYSQRELFEPWNNLPKYYILLHIMLGEILRHSMDPPTFTSNFNNELWVRGRHETYLCYEVERLHNDTWVLLNQRRGFLCNQAPHKHGFLEGRHAELCFLDVIPFWKLDLHQDYRVTCFTSWSPCFSCAQEMAKFISNNKHVSLCIFAARIYDDQGRCQEGLRTLAKAGAKISIMTYSEFKHCWDTFVDHQGCPFQPWDGLEEHSQALSGRLRAILQNQGN

SEQ ID NO: 278 - protein, 377 aa, Chlorocebus sabaeus
MNPQIRNMVEQMEPDIFVYYFNNRPILSGRNTVWLCYEVKTKDPSGPPLDANIFQGKLYPEAKDHPEMKFLHWFRKWRQLHRDQEYEVTWYVSWSPCTRCANSVATFLAEDPKVTLTIFVARLYYFWKPDYQQALRILCQERGGPHATMKIMNYNEFQHCWNEFVDGQGKPFKPRKNLPKHYTLLHATLGELLRHVMDPGTFTSNFNNKPWVSGQRETYLCYKVERSHNDTWVLLNQHRGFLRNQAPDRHGFPKGRHAELCFLDLIPFWKLDDQQYRVTCFTSWSPCFSCAQKMAKFISNNKHVSLCIFAARIYDDQGRCQEGLRTLHRDGAKIAVMNYSEFEYCWDTFVDRQGRPFQPWDGLDEHSQALSGRLRAI

SEQ ID NO: 279 - protein, 384 aa, Homo sapiens
MKPHFRNTVERMYRDTFSYNFYNRPILSRRNTVWLCYEVKTKGPSRPPLDAKIFRGQVYSELKYHPEMRFFHWFSKWRKLHRDQEYEVTWYISWSPCTKCTRDMATFLAEDPKVTLTIFVARLYYFWDPDYQEALRSLCQKRDGPRATMKIMNYDEFQHCWSKFVYSQRELFEPWNNLPKYYILLHIMLGEILRHSMDPPTFTFNFNNEPWVRGRHETYLCYEVERMHNDTWVLLNQRRGFLCNQAPHKHGFLEGRHAELCFLDVIPFWKLDLDQDYRVTCFTSWSPCFSCAQEMAKFISKNKHVSLCIFTARIYDDQGRCQEGLRTLAEAGAKISIMTYSEFKHCWDTFVDHQGCPFQPWDGLDEHSQDLSGRLRAILQNQEN

SEQ ID NO: 280 - protein, 373 aa, Homo sapiens
MKPHFRNTVERMYRDTFSYNFYNRPILSRRNTVWLCYEVKTKGPSRPRLDAKIFRGQVYSQPEHHAEMCFLSWFCGNQLPAYKCFQITWFVSWTPCPDCVAKLAEFLAEHPNVTLTISAARLYYYWERDYRRALCRLSQAGARVKIMDDEEFAYCWENFVYSEGQPFMPWYKFDDNYAFLHRTLKEILRNPMEAMYPHIFYFHFKNLRKAYGRNESWLCFTMEVVKHHSPVSWKRGVFRNQVDPETHCHAERCFLSWFCDDILSPNTNYEVTWYTSWSPCPECAGEVAEFLARHSNVNLTIFTARLYYFWDTDYQEGLRSLSQEGASVEIMGYKDFKYCWENFVYNDDEPFKPWKGLKYNFLFLDSKLQEILE

SEQ ID NO: 281 - protein, 382 aa, Homo sapiens
MNPQIRNPMERMYRDTFYDNFENEPILYGRSYTWLCYEVKIKRGRSNLLWDTGVFRGQVYFKPQYHAEMCFLSWFCGNQLPAYKCFQITWFVSWTPCPDCVAKLAEFLSEHPNVTLTISAARLYYYWERDYRRALCRLSQAGARVTIMDYEEFAYCWENFVYNEGQQFMPWYKFDENYAFLHRTLKEILRYLMDPDTFTFNFNNDPLVLRRRQTYLCYEVERLDNGTWVLMDQHMGFLCNEAKNLLCGFYGRHAELRFLDLVPSLQLDPAQIYRVTWFISWSPCFSWGCAGEVRAFLQENTHVRLRIFAARIYDYDPLYKEALQMLRDAGAQVSIMTYDEFEYCWDTFVYRQGCPFQPWDGLEEHSQALSGRLRAILQNQGN

SEQ ID NO: 282 - protein, 190 aa, Homo sapiens
MNPQIRNPMKAMYPGTFYFQFKNLWEANDRNETWLCFTVEGIKRRSVVSWKTGVFRNQVDSETHCHAERCFLSWFCDDILSPNTKYQVTWYTSWSPCPDCAGEVAEFLARHSNVNLTIFTARLYYFQYPCYQEGLRSLSQEGVAVEIMDYEDFKYCWENFVYNDNEPFKPWKGLKTNFRLLKRRLRESLQ

SEQ ID NO: 283 - protein, 199 aa, Homo sapiens
MEASPASGPRHLMDPHIFTSNFNNGIGRHKTYLCYEVERLDNGTSVKMDQHRGFLHNQAKNLLCGFYGRHAELRFLDLVPSLQLDPAQIYRVTWFISWSPCFSWGCAGEVRAFLQENTHVRLRIFAARIYDYDPLYKEALQMLRDAGAQVSIMTYDEFKHCWDTFVDHQGCPFQPWDGLDEHSQALSGRLRAILQNQGN

SEQ ID NO: 284 - protein, 200 aa, Homo sapiens
MALLTAETFRLQFNNKRRLRRPYYPRKALLCYQLTPQNGSTPTRGYFENKKKCHAEICFINEIKSMGLDETQCYQVTCYLTWSPCSSCAWELVDFIKAHDHLNLGIFASRLYYHWCKPQQKGLRLLCGSQVPVEVMGFPKFADCWENFVDHEKPLSFNPYKMLEELDKNSRAIKRRLERIKIPGVRAQGRYMDILCDAEV

SEQ ID NO: 285 - protein, 386 aa, Homo sapiens
MNPQIRNPMERMYRDTFYDNFENEPILYGRSYTWLCYEVKIKRGRSNLLWDTGVFRGPVLPKRQSNHRQEVYFRFENHAEMCFLSWFCGNRLPANRRFQITWFVSWNPCLPCVVKVTKFLAEHPNVTLTISAARLYYYRDRDWRWVLLRLHKAGARVKIMDYEDFAYCWENFVCNEGQPFMPWYKFDDNYASLHRTLKEILRNPMEAMYPHIFYFHFKNLLKACGRNESWLCFTMEVTKHHSAVFRKRGVFRNQVDPETHCHAERCFLSWFCDDILSPNTNYEVTWYTSWSPCPECAGEVAEFLARHSNVNLTIFTARLCYFWDTDYQEGLCSLSQEGASVKIMGYKDFVSCWKNFVYSDDEPFKPWKGLQTNFRLLKRRLREILQ

SEQ ID NO: 286 - protein, 236 aa, Homo sapiens
MTSEKGPSTGDPTLRRRIEPWEFDVFYDPRELRKEACLLYEIKWGMSRKIWRSSGKNTTNHVEVNFIKKFTSERDFHPSMSCSITWFLSWSPCWECSQAIREFLSRHPGVTLVIYVARLFWHMDQQNRQGLRDLVNSGVTIQIMRASEYYHCWRNFVNYPPGDEAHWPQYPPLWMMLYALELHCIILSLPPCLKISRRWQNHLTFFRLHLQNCHYQTIPPHILLATGLIHPSVAWR

SEQ ID NO: 287 - protein, 229 aa, Mus musculus
MSSETGPVAVDPTLRRRIEPHEFEVFFDPRELRKETCLLYEINWGGRHSVWRHTSQNTSNHVEVNFLEKFTTERYFRPNTRCSITWFLSWSPCGECSRAITEFLSRHPYVTLFIYIARLYHHTDQRNRQGLRDLISSGVTIQIMTEQEYCYCWRNFVNYPPSNEAYWPRYPHLWVKLYVLELYCIILGLPPCLKILRRKQPQLTFFTITLQTCHYQRIPPHLLWATGLK

SEQ ID NO: 288 - protein, 229 aa, Rattus rattus [sequence omitted]

SEQ ID NO: 289 - protein, 208 aa, Petromyzon marinus
MTDAEYVRIHEKLDIYTFKKQFFNNKKSVSHRCYVLFELKRRGERRACFWGYAVNKPQSGTERGIHAEIFSIRKVEEYLRDNPGQFTINWYSSWSPCADCAEKILEWYNQELRGNGHTLKIWACKLYYEKNARNQIGLWNLRDNGVGLNVMVSEHYQCCRKIFIQSSHNQLNENRWLEKTLKRAEKRRSELSIMIQVKILHTTKSPAV

SEQ ID NO: 290 - protein, 384 aa, Homo sapiens
MKPHFRNTVERMYRDTFSYNFYNRPILSRRNTVWLCYEVKTKGPSRPPLDAKIFRGQVYSELKYHPEMRFFHWFSKWRKLHRDQEYEVTWYISWSPCTKCTRDMATFLAEDPKVTLTIFVARLYYFWDPDYQEALRSLCQKRDGPRATMKIMNYDEFQHCWSKFVYSQRELFEPWNNLPKYYILLHIMLGEILRHSMDPPTFTFNFNNEPWVRGRHETYLCYEVERMHNDTWVLLNQRRGFLCNQAPHKHGFLEGRHAELCFLDVIPFWKLDLDQDYRVTCFTSWSPCFSCAQEMAKFISKNKHVSLCIFTARIYRRQGRCQEGLRTLAEAGAKISIMTYSEFKHCWDTFVDHQGCPFQPWDGLDEHSQDLSGRLRAILQNQEN

SEQ ID NO: 291 - protein, 184 aa, Homo sapiens
MDPPTFTFNFNNEPWVRGRHETYLCYEVERMHNDTWVLLNQRRGFLCNQAPHKHGFLEGRHAELCFLDVIPFWKLDLDQDYRVTCFTSWSPCFSCAQEMAKFISKNKHVSLCIFTARIYDDQGRCQEGLRTLAEAGAKISIMTYSEFKHCWDTFVDHQGCPFQPWDGLDEHSQDLSGRLRAILQ

SEQ ID NO: 292 - protein, 184 aa, Homo sapiens
MDPPTFTFNFNNEPWVRGRHETYLCYEVERMHNDTWVLLNQRRGFLCNQAPHKHGFLEGRHAELCFLDVIPFWKLDLDQDYRVTCFTSWSPCFSCAQEMAKFISKNKHVSLCIFTARIYRRQGRCQEGLRTLAEAGAKISIMTYSEFKHCWDTFVDHQGCPFQPWDGLDEHSQDLSGRLRAILQ

SEQ ID NO: 293 - protein, 1633 aa, synthetic construct
  REGION 1..1633: note = Synthetic Polypeptide
MGSSHHHHHHMSSETGPVAVDPTLRRRIEPHEFEVFFDPRELRKETCLLYEINWGGRHSIWRHTSQNTNKHVEVNFIEKFTTERYFCPNTRCSITWFLSWSPCGECSRAITEFLSRYPHVTLFIYIARLYHHADPRNRQGLRDLISSGVTIQIMTEQESGYCWRNFVNYSPSNEAHWPRYPHLWVRLYVLELYCIILGLPPCLNILRRKQPQLTFFTIALQSCHYQRLPPHILWATGLKSGSETPGTSESATPESDKKYSIGLAIGTNSVGWAVITDEYKVPSKKFKVLGNTDRHSIKKNLIGALLFDSGETAEATRLKRTARRRYTRRKNRICYLQEIFSNEMAKVDDSFFHRLEESFLVEEDKKHERHPIFGNIVDEVAYHEKYPTIYHLRKKLVDSTDKADLRLIYLALAHMIKFRGHFLIEGDLNPDNSDVDKLFIQLVQTYNQLFEENPINASGVDAKAILSARLSKSRRLENLIAQLPGEKKNGLFGNLIALSLGLTPNFKSNFDLAEDAKLQLSKDTYDDDLDNLLAQIGDQYADLFLAAKNLSDAILLSDILRVNTEITKAPLSASMIKRYDEHHQDLTLLKALVRQQLPEKYKEIFFDQSKNGYAGYIDGGASQEEFYKFIKPILEKMDGTEELLVKLNREDLLRKQRTFDNGSIPHQIHLGELHAILRRQEDFYPFLKDNREKIEKILTFRIPYYVGPLARGNSRFAWMTRKSEETITPWNFEEVVDKGASAQSFIERMTNFDKNLPNEKVLPKHSLLYEYFTVYNELTKVKYVTEGMRKPAFLSGEQKKAIVDLLFKTNRKVTVKQLKEDYFKKIECFDSVEISGVEDRFNASLGTYHDLLKLLKDKDFLDNEENEDILEDIVLTLTLFEDREMIEERLKTYAHLFDDKVMKQLKRRRYTGWGRLSRKLINGIRDKQSGKTILDFLKSDGFANRNFMQLIHDDSLTFKEDIQKAQVSGQGDSLHEHIANLAGSPAIKKGILQTVKVVDELVKVMGRHKPENIVIEMARENQTTQKGQKNSRERMKRIEEGIKELGSQILKEHPVENTQLQNEKLYLYYLQNGRDMYVDQELDINRLSDYDVDAIVPQSFLKDDSIDNKVLTRSDKNRGKSDNVPSEEVVKKMKNYWRQLLNAKLITQRKFDNLTKAERGGLSELDKAGFIKRQLVETRQITKHVAQILDSRMNTKYDENDKLIREVKVITLKSKLVSDFRKDFQFYKVREINNYHHAHDAYLNAVVGTALIKKYPKLESEFVYGDYKVYDVRKMIAKSEQEIGKATAKYFFYSNIMNFFKTEITLANGEIRKRPLIETNGETGEIVWDKGRDFATVRKVLSMPQVNIVKKTEVQTGGFSKESILPKRNSDKLIARKKDWDPKKYGGFDSPTVAYSVLVVAKVEKGKSKKLKSVKELLGITIMERSSFEKNPIDFLEAKGYKEVKKDLLLKLPKYSLFELENGRKRMLASAGELQKGNELALPSKYVNFLYLASHYEKLKGSPEDNEQKQLFVEQHKHYLDELLEQISEFSKRVILADANLDKVLSAYNKHRDKPIREQAENLLHLFTLTNLGAPAAFKYFDTTIDRKRYTSTKEVLDATLIHQSITGLYETRIDLSQLGGDSGGSPKKKRKV

SEQ ID NO: 294 - protein, 1623 aa, synthetic construct
  REGION 1..1623: note = Synthetic Polypeptide
MSSETGPVAVDPTLRRRIEPHEFEVFFDPRELRKETCLLYEINWGGRHSIWRHTSQNTNKHVEVNFIEKFTTERYFCPNTRCSITWFLSWSPCGECSRAITEFLSRYPHVTLFIYIARLYHHADPRNRQGLRDLISSGVTIQIMTEQESGYCWRNFVNYSPSNEAHWPRYPHLWVRLYVLELYCLLLGLPPCLNILRRKQPQLTFFTIALQSCHYQRLPPHILWATGLKSGSETPGTSESATPESDKKYSIGLAIGTNSVGWAVITDEYKVPSKKFKVLGNTDRHSIKKNLIGALLFDSGETAEATRLKRTARRRYTRRKNRICYLQEIFSNEMAKVDDSFFHRLEESFLVEEDKKHERHPIFGNIVDEVAYHEKYPTIYHLRKKLVDSTDKADLRLIYLALAHMIKFRGHFLIEGDLNPDNSDVDKLFIQLVQTYNQLFEENPINASGVDAKAILSARLSKSRRLENLIAQLPGEKKNGLFGNLIALSLGLTPNFKSNFDLAEDAKLQLSKDTYDDDLDNLLAQIGDQYADLFLAAKNLSDAILLSDILRVNTEITKAPLSASMIKRYDEHHQDLTLLKALVRQQLPEKYKEIFFDQSKNGYAGYIDGGASQEEFYKFIKPILEKMDGTEELLVKLNREDLLRKQRTFDNGSIPHQIHLGELHAILRRQEDFYPFLKDNREKIEKILTFRIPYYVGPLARGNSRFAWMTRKSEETITPWNFEEVVDKGASAQSFIERMTNFDKNLPNEKVLPKHSLLYEYFTVYNELTKVKYVTEGMRKPAFLSGEQKKAIVDLLFKTNRKVTVKQLKEDYFKKIECFDSVEISGVEDRFNASLGTYHDLLKLLKDKDFLDNEENEDILEDIVLTLTLFEDREMIEERLKTYAHLFDDKVMKQLKRRRYTGWGRLSRKLINGIRDKQSGKTILDFLKSDGFANRNFMQLIHDDSLTFKEDIQKAQVSGQGDSLHEHIANLAGSPAIKKGILQTVKVVDELVKVMGRHKPENIVIEMARENQTTQKGQKNSRERMKRIEEGIKELGSQILKEHPVENTQLQNEKLYLYYLQNGRDMYVDQELDINRLSDYDVDAIVPQSFLKDDSIDNKVLTRSDKNRGKSDNVPSEEVVKKMKNYWRQLLNAKLITQRKFDNLTKAERGGLSELDKAGFIKRQLVETRQITKHVAQILDSRMNTKYDENDKLIREVKVITLKSKLVSDFRKDFQFYKVREINNYHHAHDAYLNAVVGTALIKKYPKLESEFVYGDYKVYDVRKMIAKSEQEIGKATAKYFFYSNIMNFFKTEITLANGEIRKRPLIETNGETGEIVWDKGRDFATVRKVLSMPQVNIVKKTEVQTGGFSKESILPKRNSDKLIARKKDWDPKKYGGFDSPTVAYSVLVVAKVEKGKSKKLKSVKELLGITIMERSSFEKNPIDFLEAKGYKEVKKDLLLKLPKYSLFELENGRKRMLASAGELQKGNELALPSKYVNFLYLASHYEKLKGSPEDNEQKQLFVEQHKHYLDELLEQISEFSKRVILADANLDKVLSAYNKHRDKPIREQAENLLHLFTLTNLGAPAAFKYFDTTIDRKRYTSTKEVLDATLIHQSITGLYETRIDLSQLGGDSGGSPKKKRKV

SEQ ID NO: 295 - protein, 1630 aa, synthetic construct
  REGION 1..1630: note = Synthetic Polypeptide
MTSEKGPSTGDPTLRRRIEPWEFDVFYDPRELRKEACLLYEIKWGMSRKIWRSSGKNTTNHVEVNFIKKFTSERDFHPSMSCSITWFLSWSPCWECSQAIREFLSRHPGVTLVIYVARLFWHMDQQNRQGLRDLVNSGVTIQIMRASEYYHCWRNFVNYPPGDEAHWPQYPPLWMMLYALELHCIILSLPPCLKISRRWQNHLTFFRLHLQNCHYQTIPPHILLATGLIHPSVAWRSGSETPGTSESATPESDKKYSIGLAIGTNSVGWAVITDEYKVPSKKFKVLGNTDRHSIKKNLIGALLFDSGETAEATRLKRTARRRYTRRKNRICYLQEIFSNEMAKVDDSFFHRLEESFLVEEDKKHERHPIFGNIVDEVAYHEKYPTIYHLRKKLVDSTDKADLRLIYLALAHMIKFRGHFLIEGDLNPDNSDVDKLFIQLVQTYNQLFEENPINASGVDAKAILSARLSKSRRLENLIAQLPGEKKNGLFGNLIALSLGLTPNFKSNFDLAEDAKLQLSKDTYDDDLDNLLAQIGDQYADLFLAAKNLSDAILLSDILRVNTEITKAPLSASMIKRYDEHHQDLTLLKALVRQQLPEKYKEIFFDQSKNGYAGYIDGGASQEEFYKFIKPILEKMDGTEELLVKLNREDLLRKQRTFDNGSIPHQIHLGELHAILRRQEDFYPFLKDNREKIEKILTFRIPYYVGPLARGNSRFAWMTRKSEETITPWNFEEVVDKGASAQSFIERMTNFDKNLPNEKVLPKHSLLYEYFTVYNELTKVKYVTEGMRKPAFLSGEQKKAIVDLLFKTNRKVTVKQLKEDYFKKIECFDSVEISGVEDRFNASLGTYHDLLKIIKDKDFLDNEENEDILEDIVLTLTLFEDREMIEERLKTYAHLFDDKVMKQLKRRRYTGWGRLSRKLINGIRDKQSGKTILDFLKSDGFANRNFMQLIHDDSLTFKEDIQKAQVSGQGDSLHEHIANLAGSPAIKKGILQTVKVVDELVKVMGRHKPENIVIEMARENQTTQKGQKNSRERMKRIEEGIKELGSQILKEHPVENTQLQNEKLYLYYLQNGRDMYVDQELDINRLSDYDVDAIVPQSFLKDDSIDNKVLTRSDKNRGKSDNVPSEEVVKKMKNYWRQLLNAKLITQRKFDNLTKAERGGLSELDKAGFIKRQLVETRQITKHVAQILDSRMNTKYDENDKLIREVKVITLKSKLVSDFRKDFQFYKVREINNYHHAHDAYLNAVVGTALIKKYPKLESEFVYGDYKVYDVRKMIAKSEQEIGKATAKYFFYSNIMNFFKTEITLANGEIRKRPLIETNGETGEIVWDKGRDFATVRKVLSMPQVNIVKKTEVQTGGFSKESILPKRNSDKLIARKKDWDPKKYGGFDSPTVAYSVLVVAKVEKGKSKKLKSVKELLGITIMERSSFEKNPIDFLEAKGYKEVKKDLIIKLPKYSLFELENGRKRMLASAGELQKGNELALPSKYVNFLYLASHYEKLKGSPEDNEQKQLFVEQHKHYLDEIIEQISEFSKRVILADANLDKVLSAYNKHRDKPIREQAENIIHLFTLTNLGAPAAFKYFDTTIDRKRYTSTKEVLDATLIHQSITGLYETRIDLSQLGGDSGGSPKKKRKV

SEQ ID NO: 296 - protein, 1710 aa, synthetic construct
  REGION 1..1710: note = Synthetic Polypeptide
MSSETGPVAVDPTLRRRIEPHEFEVFFDPRELRKETCLLYEINWGGRHSIWRHTSQNTNKHVEVNFIEKFTTERYFCPNTRCSITWFLSWSPCGECSRAITEFLSRYPHVTLFIYIARLYHHADPRNRQGLRDLISSGVTIQIMTEQESGYCWRNFVNYSPSNEAHWPRYPHLWVRLYVLELYCLLLGLPPCLNILRRKQPQLTFFTIALQSCHYQRLPPHILWATGLKSGSETPGTSESATPESDKKYSIGLAIGTNSVGWAVITDEYKVPSKKFKVLGNTDRHSIKKNLIGALLFDSGETAEATRLKRTARRRYTRRKNRICYLQEIFSNEMAKVDDSFFHRLEESFLVEEDKKHERHPIFGNIVDEVAYHEKYPTIYHLRKKLVDSTDKADLRLIYLALAHMIKFRGHFLIEGDLNPDNSDVDKLFIQLVQTYNQLFEENPINASGVDAKAILSARLSKSRRLENLIAQLPGEKKNGLFGNLIALSLGLTPNFKSNFDLAEDAKLQLSKDTYDDDLDNLLAQIGDQYADLFLAAKNLSDAILLSDILRVNTEITKAPLSASMIKRYDEHHQDLTLLKALVRQQLPEKYKEIFFDQSKNGYAGYIDGGASQEEFYKFIKPILEKMDGTEELLVKLNREDLLRKQRTFDNGSIPHQIHLGELHAILRRQEDFYPFLKDNREKIEKILTFRIPYYVGPLARGNSRFAWMTRKSEETITPWNFEEVVDKGASAQSFIERMTNFDKNLPNEKVLPKHSLLYEYFTVYNELTKVKYVTEGMRKPAFLSGEQKKAIVDLLFKTNRKVTVKQLKEDYFKKIECFDSVEISGVEDRFNASLGTYHDLLKLLKDKDFLDNEENEDILEDIVLTLTLFEDREMIEERLKTYAHLFDDKVMKQLKRRRYTGWGRLSRKLINGIRDKQSGKTILDFLKSDGFANRNFMQLIHDDSLTFKEDIQKAQVSGQGDSLHEHIANLAGSPAIKKGILQTVKVVDELVKVMGRHKPENIVIEMARENQTTQKGQKNSRERMKRIEEGIKELGSQILKEHPVENTQLQNEKLYLYYLQNGRDMYVDQELDINRLSDYDVDAIVPQSFLKDDSIDNKVLTRSDKNRGKSDNVPSEEVVKKMKNYWRQLLNAKLITQRKFDNLTKAERGGLSELDKAGFIKRQLVETRQITKHVAQILDSRMNTKYDENDKLIREVKVITLKSKLVSDFRKDFQFYKVREINNYHHAHDAYLNAVVGTALIKKYPKLESEFVYGDYKVYDVRKMIAKSEQEIGKATAKYFFYSNIMNFFKTEITLANGEIRKRPLIETNGETGEIVWDKGRDFATVRKVLSMPQVNIVKKTEVQTGGFSKESILPKRNSDKLIARKKDWDPKKYGGFDSPTVAYSVLVVAKVEKGKSKKLKSVKELLGITIMERSSFEKNPIDFLEAKGYKEVKKDLLLKLPKYSLFELENGRKRMLASAGELQKGNELALPSKYVNFLYLASHYEKLKGSPEDNEQKQLFVEQHKHYLDELLEQISEFSKRVILADANLDKVLSAYNKHRDKPIREQAENLLHLFTLTNLGAPAAFKYFDTTIDRKRYTSTKEVLDATLIHQSITGLYETRIDLSQLGGDSGGSTNLSDLLEKETGKQLVIQESILMLPEEVEEVIGNKPESDILVHTAYDESTDENVMLLTSDAPEYKPWALVIQDSNGENKIKMLSGGSPKKKRKV

SEQ ID NO: 297 - protein, 1710 aa, synthetic construct
  REGION 1..1710: note = Synthetic Polypeptide
MSSETGPVAVDPTLRRRIEPHEFEVFFDPRELRKETCLLYEINWGGRHSIWRHTSQNTNKHVEVNFIEKFTTERYFCPNTRCSITWFLSWSPCGECSRAITEFLSRYPHVTLFIYIARLYHHADPRNRQGLRDLISSGVTIQIMTEQESGYCWRNFVNYSPSNEAHWPRYPHLWVRLYVLELYCLLLGLPPCLNILRRKQPQLTFFTIALQSCHYQRLPPHILWATGLKSGSETPGTSESATPESDKKYSIGLAIGTNSVGWAVITDEYKVPSKKFKVLGNTDRHSIKKNLIGALLFDSGETAEATRLKRTARRRYTRRKNRICYLQEIFSNEMAKVDDSFFHRLEESFLVEEDKKHERHPIFGNIVDEVAYHEKYPTIYHLRKKLVDSTDKADLRLIYLALAHMIKFRGHFLIEGDLNPDNSDVDKLFIQLVQTYNQLFEENPINASGVDAKAILSARLSKSRRLENLIAQLPGEKKNGLFGNLIALSLGLTPNFKSNFDLAEDAKLQLSKDTYDDDLDNLLAQIGDQYADLFLAAKNLSDAILLSDILRVNTEITKAPLSASMIKRYDEHHQDLTLLKALVRQQLPEKYKEIFFDQSKNGYAGYIDGGASQEEFYKFIKPILEKMDGTEELLVKLNREDLLRKQRTFDNGSIPHQIHLGELHAILRRQEDFYPFLKDNREKIEKILTFRIPYYVGPLARGNSRFAWMTRKSEETITPWNFEEVVDKGASAQSFIERMTNFDKNLPNEKVLPKHSLLYEYFTVYNELTKVKYVTEGMRKPAFLSGEQKKAIVDLLFKTNRKVTVKQLKEDYFKKIECFDSVEISGVEDRFNASLGTYHDLLKLLKDKDFLDNEENEDILEDIVLTLTLFEDREMIEERLKTYAHLFDDKVMKQLKRRRYTGWGRLSRKLINGIRDKQSGKTILDFLKSDGFANRNFMQLIHDDSLTFKEDIQKAQVSGQGDSLHEHIANLAGSPAIKKGILQTVKVVDELVKVMGRHKPENIVIEMARENQTTQKGQKNSRERMKRIEEGIKELGSQILKEHPVENTQLQNEKLYLYYLQNGRDMYVDQELDINRLSDYDVDHIVPQSFLKDDSIDNKVLTRSDKNRGKSDNVPSEEVVKKMKNYWRQLLNAKLITQRKFDNLTKAERGGLSELDKAGFIKRQLVETRQITKHVAQILDSRMNTKYDENDKLIREVKVITLKSKLVSDFRKDFQFYKVREINNYHHAHDAYLNAVVGTALIKKYPKLESEFVYGDYKVYDVRKMIAKSEQEIGKATAKYFFYSNIMNFFKTEITLANGEIRKRPLIETNGETGEIVWDKGRDFATVRKVLSMPQVNIVKKTEVQTGGFSKESILPKRNSDKLIARKKDWDPKKYGGFDSPTVAYSVLVVAKVEKGKSKKLKSVKELLGITIMERSSFEKNPIDFLEAKGYKEVKKDLLLKLPKYSLFELENGRKRMLASAGELQKGNELALPSKYVNFLYLASHYEKLKGSPEDNEQKQLFVEQHKHYLDELLEQISEFSKRVILADANLDKVLSAYNKHRDKPIREQAENLLHLFTLTNLGAPAAFKYFDTTIDRKRYTSTKEVLDATLIHQSITGLYETRIDLSQLGGDSGGSTNLSDLLEKETGKQLVIQESILMLPEEVEEVIGNKPESDILVHTAYDESTDENVMLLTSDAPEYKPWALVIQDSNGENKIKMLSGGSPKKKRKV

SEQ ID NO: 298 - protein, 1679 aa, synthetic construct
  REGION 1..1679: note = Synthetic Polypeptide
MTDAEYVRIHEKLDIYTFKKQFFNNKKSVSHRCYVLFELKRRGERRACFWGYAVNKPQSGTERGIHAEIFSIRKVEEYLRDNPGQFTINWYSSWSPCADCAEKILEWYNQELRGNGHTLKIWACKLYYEKNARNQIGLWNLRDNGVGLNVMVSEHYQCCRKIFIQSSHNQLNENRWLEKTLKRAEKRRSELSIMIQVKILHTTKSPAVSGSETPGTSESATPESDKKYSIGLAIGTNSVGWAVITDEYKVPSKKFKVLGNTDRHSIKKNLIGALLFDSGETAEATRLKRTARRRYTRRKNRICYLQEIFSNEMAKVDDSFFHRLEESFLVEEDKKHERHPIFGNIVDEVAYHEKYPTIYHLRKKLVDSTDKADLRLIYLALAHMIKFRGHFLIEGDLNPDNSDVDKLFIQLVQTYNQLFEENPINASGVDAKAILSARLSKSRRLENLIAQLPGEKKNGLFGNLIALSLGLTPNFKSNFDLAEDAKLQLSKDTYDDDLDNLLAQIGDQYADLFLAAKNLSDAILLSDILRVNTEITKAPLSASMIKRYDEHHQDLTLLKALVRQQLPEKYKEIFFDQSKNGYAGYIDGGASQEEFYKFIKPILEKMDGTEELLVKLNREDLLRKQRTFDNGSIPHQIHLGELHAILRRQEDFYPFLKDNREKIEKILTFRIPYYVGPLARGNSRFAWMTRKSEETITPWNFEEVVDKGASAQSFIERMTNFDKNLPNEKVLPKHSLLYEYFTVYNELTKVKYVTEGMRKPAFLSGEQKKAIVDLLFKTNRKVTVKQLKEDYFKKIECFDSVEISGVEDRFNASLGTYHDLLKIIKDKDFLDNEENEDILEDIVLTLTLFEDREMIEERLKTYAHLFDDKVMKQLKRRRYTGWGRLSRKLINGIRDKQSGKTILDFLKSDGFANRNFMQLIHDDSLTFKEDIQKAQVSGQGDSLHEHIANLAGSPAIKKGILQTVKVVDELVKVMGRHKPENIVIEMARENQTTQKGQKNSRERMKRIEEGIKELGSQILKEHPVENTQLQNEKLYLYYLQNGRDMYVDQELDINRLSDYDVDAIVPQSFLKDDSIDNKVLTRSDKNRGKSDNVPSEEVVKKMKNYWRQLLNAKLITQRKFDNLTKAERGGLSELDKAGFIKRQLVETRQITKHVAQILDSRMNTKYDENDKLIREVKVITLKSKLVSDFRKDFQFYKVREINNYHHAHDAYLNAVVGTALIKKYPKLESEFVYGDYKVYDVRKMIAKSEQEIGKATAKYFFYSNIMNFFKTEITLANGEIRKRPLIETNGETGEIVWDKGRDFATVRKVLSMPQVNIVKKTEVQTGGFSKESILPKRNSDKLIARKKDWDPKKYGGFDSPTVAYSVLVVAKVEKGKSKKLKSVKELLGITIMERSSFEKNPIDFLEAKGYKEVKKDLIIKLPKYSLFELENGRKRMLASAGELQKGNELALPSKYVNFLYLASHYEKLKGSPEDNEQKQLFVEQHKHYLDEIIEQISEFSKRVILADANLDKVLSAYNKHRDKPIREQAENIIHLFTLTNLGAPAAFKYFDTTIDRKRYTSTKEVLDATLIHQSITGLYETRIDLSQLGGDSGGSMTNLSDIIEKETGKQLVIQESILMLPEEVEEVIGNKPESDILVHTAYDESTDENVMLLTSDAPEYKPWALVIQDSNGENKIKML

SEQ ID NO: 299 - protein, 1689 aa, synthetic construct
  REGION 1..1689: note = Synthetic Polypeptide
MTDAEYVRIHEKLDIYTFKKQFFNNKKSVSHRCYVLFELKRRGERRACFWGYAVNKPQSGTERGIHAEIFSIRKVEEYLRDNPGQFTINWYSSWSPCADCAEKILEWYNQELRGNGHTLKIWACKLYYEKNARNQIGLWNLRDNGVGLNVMVSEHYQCCRKIFIQSSHNQLNENRWLEKTLKRAEKRRSELSIMIQVKILHTTKSPAVSGSETPGTSESATPESDKKYSIGLAIGTNSVGWAVITDEYKVPSKKFKVLGNTDRHSIKKNLIGALLFDSGETAEATRLKRTARRRYTRRKNRICYLQEIFSNEMAKVDDSFFHRLEESFLVEEDKKHERHPIFGNIVDEVAYHEKYPTIYHLRKKLVDSTDKADLRLIYLALAHMIKFRGHFLIEGDLNPDNSDVDKLFIQLVQTYNQLFEENPINASGVDAKAILSARLSKSRRLENLIAQLPGEKKNGLFGNLIALSLGLTPNFKSNFDLAEDAKLQLSKDTYDDDLDNLLAQIGDQYADLFLAAKNLSDAILLSDILRVNTEITKAPLSASMIKRYDEHHQDLTLLKALVRQQLPEKYKEIFFDQSKNGYAGYIDGGASQEEFYKFIKPILEKMDGTEELLVKLNREDLLRKQRTFDNGSIPHQIHLGELHAILRRQEDFYPFLKDNREKIEKILTFRIPYYVGPLARGNSRFAWMTRKSEETITPWNFEEVVDKGASAQSFIERMTNFDKNLPNEKVLPKHSLLYEYFTVYNELTKVKYVTEGMRKPAFLSGEQKKAIVDLLFKTNRKVTVKQLKEDYFKKIECFDSVEISGVEDRFNASLGTYHDLLKIIKDKDFLDNEENEDILEDIVLTLTLFEDREMIEERLKTYAHLFDDKVMKQLKRRRYTGWGRLSRKLINGIRDKQSGKTILDFLKSDGFANRNFMQLIHDDSLTFKEDIQKAQVSGQGDSLHEHIANLAGSPAIKKGILQTVKVVDELVKVMGRHKPENIVIEMARENQTTQKGQKNSRERMKRIEEGIKELGSQILKEHPVENTQLQNEKLYLYYLQNGRDMYVDQELDINRLSDYDVDHIVPQSFLKDDSIDNKVLTRSDKNRGKSDNVPSEEVVKKMKNYWRQLLNAKLITQRKFDNLTKAERGGLSELDKAGFIKRQLVETRQITKHVAQILDSRMNTKYDENDKLIREVKVITLKSKLVSDFRKDFQFYKVREINNYHHAHDAYLNAVVGTALIKKYPKLESEFVYGDYKVYDVRKMIAKSEQEIGKATAKYFFYSNIMNFFKTEITLANGEIRKRPLIETNGETGEIVWDKGRDFATVRKVLSMPQVNIVKKTEVQTGGFSKESILPKRNSDKLIARKKDWDPKKYGGFDSPTVAYSVLVVAKVEKGKSKKLKSVKELLGITIMERSSFEKNPIDFLEAKGYKEVKKDLIIKLPKYSLFELENGRKRMLASAGELQKGNELALPSKYVNFLYLASHYEKLKGSPEDNEQKQLFVEQHKHYLDEIIEQISEFSKRVILADANLDKVLSAYNKHRDKPIREQAENIIHLFTLTNLGAPAAFKYFDTTIDRKRYTSTKEVLDATLIHQSITGLYETRIDLSQLGGDSGGSTNLSDIIEKETGKQLVIQESILMLPEEVEEVIGNKPESDILVHTAYDESTDENVMLLTSDAPEYKPWALVIQDSNGENKIKMLSGGSPKKKRKV

SEQ ID NO: 300 - protein, 1655 aa, synthetic construct
  REGION 1..1655: note = Synthetic Polypeptide
MDPPTFTFNFNNEPWVRGRHETYLCYEVERMHNDTWVLLNQRRGFLCNQAPHKHGFLEGRHAELCFLDVIPFWKLDLDQDYRVTCFTSWSPCFSCAQEMAKFISKNKHVSLCIFTARIYDDQGRCQEGLRTLAEAGAKISIMTYSEFKHCWDTFVDHQGCPFQPWDGLDEHSQDLSGRLRAILQSGSETPGTSESATPESDKKYSIGLAIGTNSVGWAVITDEYKVPSKKFKVLGNTDRHSIKKNLIGALLFDSGETAEATRLKRTARRRYTRRKNRICYLQEIFSNEMAKVDDSFFHRLEESFLVEEDKKHERHPIFGNIVDEVAYHEKYPTIYHLRKKLVDSTDKADLRLIYLALAHMIKFRGHFLIEGDLNPDNSDVDKLFIQLVQTYNQLFEENPINASGVDAKAILSARLSKSRRLENLIAQLPGEKKNGLFGNLIALSLGLTPNFKSNFDLAEDAKLQLSKDTYDDDLDNLLAQIGDQYADLFLAAKNLSDAILLSDILRVNTEITKAPLSASMIKRYDEHHQDLTLLKALVRQQLPEKYKEIFFDQSKNGYAGYIDGGASQEEFYKFIKPILEKMDGTEELLVKLNREDLLRKQRTFDNGSIPHQIHLGELHAILRRQEDFYPFLKDNREKIEKILTFRIPYYVGPLARGNSRFAWMTRKSEETITPWNFEEVVDKGASAQSFIERMTNFDKNLPNEKVLPKHSLLYEYFTVYNELTKVKYVTEGMRKPAFLSGEQKKAIVDLLFKTNRKVTVKQLKEDYFKKIECFDSVEISGVEDRFNASLGTYHDLLKIIKDKDFLDNEENEDILEDIVLTLTLFEDREMIEERLKTYAHLFDDKVMKQLKRRRYTGWGRLSRKLINGIRDKQSGKTILDFLKSDGFANRNFMQLIHDDSLTFKEDIQKAQVSGQGDSLHEHIANLAGSPAIKKGILQTVKVVDELVKVMGRHKPENIVIEMARENQTTQKGQKNSRERMKRIEEGIKELGSQILKEHPVENTQLQNEKLYLYYLQNGRDMYVDQELDINRLSDYDVDAIVPQSFLKDDSIDNKVLTRSDKNRGKSDNVPSEEVVKKMKNYWRQLLNAKLITQRKFDNLTKAERGGLSELDKAGFIKRQLVETRQITKHVAQILDSRMNTKYDENDKLIREVKVITLKSKLVSDFRKDFQFYKVREINNYHHAHDAYLNAVVGTALIKKYPKLESEFVYGDYKVYDVRKMIAKSEQEIGKATAKYFFYSNIMNFFKTEITLANGEIRKRPLIETNGETGEIVWDKGRDFATVRKVLSMPQVNIVKKTEVQTGGFSKESILPKRNSDKLIARKKDWDPKKYGGFDSPTVAYSVLVVAKVEKGKSKKLKSVKELLGITIMERSSFEKNPIDFLEAKGYKEVKKDLIIKLPKYSLFELENGRKRMLASAGELQKGNELALPSKYVNFLYLASHYEKLKGSPEDNEQKQLFVEQHKHYLDEIIEQISEFSKRVILADANLDKVLSAYNKHRDKPIREQAENIIHLFTLTNLGAPAAFKYFDTTIDRKRYTSTKEVLDATLIHQSITGLYETRIDLSQLGGDSGGSMTNLSDIIEKETGKQLVIQESILMLPEEVEEVIGNKPESDILVHTAYDESTDENVMLLTSDAPEYKPWALVIQDSNGENKIKML

SEQ ID NO: 301 - protein, 1665 aa, synthetic construct
  REGION 1..1665: note = Synthetic Polypeptide
MDPPTFTFNFNNEPWVRGRHETYLCYEVERMHNDTWVLLNQRRGFLCNQAPHKHGFLEGRHAELCFLDVIPFWKLDLDQDYRVTCFTSWSPCFSCAQEMAKFISKNKHVSLCIFTARIYDDQGRCQEGLRTLAEAGAKISIMTYSEFKHCWDTFVDHQGCPFQPWDGLDEHSQDLSGRLRAILQSGSETPGTSESATPESDKKYSIGLAIGTNSVGWAVITDEYKVPSKKFKVLGNTDRHSIKKNLIGALLFDSGETAEATRLKRTARRRYTRRKNRICYLQEIFSNEMAKVDDSFFHRLEESFLVEEDKKHERHPIFGNIVDEVAYHEKYPTIYHLRKKLVDSTDKADLRLIYLALAHMIKFRGHFLIEGDLNPDNSDVDKLFIQLVQTYNQLFEENPINASGVDAKAILSARLSKSRRLENLIAQLPGEKKNGLFGNLIALSLGLTPNFKSNFDLAEDAKLQLSKDTYDDDLDNLLAQIGDQYADLFLAAKNLSDAILLSDILRVNTEITKAPLSASMIKRYDEHHQDLTLLKALVRQQLPEKYKEIFFDQSKNGYAGYIDGGASQEEFYKFIKPILEKMDGTEELLVKLNREDLLRKQRTFDNGSIPHQIHLGELHAILRRQEDFYPFLKDNREKIEKILTFRIPYYVGPLARGNSRFAWMTRKSEETITPWNFEEVVDKGASAQSFIERMTNFDKNLPNEKVLPKHSLLYEYFTVYNELTKVKYVTEGMRKPAFLSGEQKKAIVDLLFKTNRKVTVKQLKEDYFKKIECFDSVEISGVEDRFNASLGTYHDLLKIIKDKDFLDNEENEDILEDIVLTLTLFEDREMIEERLKTYAHLFDDKVMKQLKRRRYTGWGRLSRKLINGIRDKQSGKTILDFLKSDGFANRNFMQLIHDDSLTFKEDIQKAQVSGQGDSLHEHIANLAGSPAIKKGILQTVKVVDELVKVMGRHKPENIVIEMARENQTTQKGQKNSRERMKRIEEGIKELGSQILKEHPVENTQLQNEKLYLYYLQNGRDMYVDQELDINRLSDYDVDHIVPQSFLKDDSIDNKVLTRSDKNRGKSDNVPSEEVVKKMKNYWRQLLNAKLITQRKFDNLTKAERGGLSELDKAGFIKRQLVETRQITKHVAQILDSRMNTKYDENDKLIREVKVITLKSKLVSDFRKDFQFYKVREINNYHHAHDAYLNAVVGTALIKKYPKLESEFVYGDYKVYDVRKMIAKSEQEIGKATAKYFFYSNIMNFFKTEITLANGEIRKRPLIETNGETGEIVWDKGRDFATVRKVLSMPQVNIVKKTEVQTGGFSKESILPKRNSDKLIARKKDWDPKKYGGFDSPTVAYSVLVVAKVEKGKSKKLKSVKELLGITIMERSSFEKNPIDFLEAKGYKEVKKDLIIKLPKYSLFELENGRKRMLASAGELQKGNELALPSKYVNFLYLASHYEKLKGSPEDNEQKQLFVEQHKHYLDEIIEQISEFSKRVILADANLDKVLSAYNKHRDKPIREQAENIIHLFTLTNLGAPAAFKYFDTTIDRKRYTSTKEVLDATLIHQSITGLYETRIDLSQLGGDSGGSTNLSDIIEKETGKQLVIQESILMLPEEVEEVIGNKPESDILVHTAYDESTDENVMLLTSDAPEYKPWALVIQDSNGENKIKMLSGGSPKKKRKV

SEQ ID NO: 302 - protein, 1665 aa, synthetic construct
  REGION 1..1665: note = Synthetic Polypeptide
MDPPTFTFNFNNEPWVRGRHETYLCYEVERMHNDTWVLLNQRRGFLCNQAPHKHGFLEGRHAELCFLDVIPFWKLDLDQDYRVTCFTSWSPCFSCAQEMAKFISKNKHVSLCIFTARIYRRQGRCQEGLRTLAEAGAKISIMTYSEFKHCWDTFVDHQGCPFQPWDGLDEHSQDLSGRLRAILQSGSETPGTSESATPESDKKYSIGLAIGTNSVGWAVITDEYKVPSKKFKVLGNTDRHSIKKNLIGALLFDSGETAEATRLKRTARRRYTRRKNRICYLQEIFSNEMAKVDDSFFHRLEESFLVEEDKKHERHPIFGNIVDEVAYHEKYPTIYHLRKKLVDSTDKADLRLIYLALAHMIKFRGHFLIEGDLNPDNSDVDKLFIQLVQTYNQLFEENPINASGVDAKAILSARLSKSRRLENLIAQLPGEKKNGLFGNLIALSLGLTPNFKSNFDLAEDAKLQLSKDTYDDDLDNLLAQIGDQYADLFLAAKNLSDAILLSDILRVNTEITKAPLSASMIKRYDEHHQDLTLLKALVRQQLPEKYKEIFFDQSKNGYAGYIDGGASQEEFYKFIKPILEKMDGTEELLVKLNREDLLRKQRTFDNGSIPHQIHLGELHAILRRQEDFYPFLKDNREKIEKILTFRIPYYVGPLARGNSRFAWMTRKSEETITPWNFEEVVDKGASAQSFIERMTNFDKNLPNEKVLPKHSLLYEYFTVYNELTKVKYVTEGMRKPAFLSGEQKKAIVDLLFKTNRKVTVKQLKEDYFKKIECFDSVEISGVEDRFNASLGTYHDLLKIIKDKDFLDNEENEDILEDIVLTLTLFEDREMIEERLKTYAHLFDDKVMKQLKRRRYTGWGRLSRKLINGIRDKQSGKTILDFLKSDGFANRNFMQLIHDDSLTFKEDIQKAQVSGQGDSLHEHIANLAGSPAIKKGILQTVKVVDELVKVMGRHKPENIVIEMARENQTTQKGQKNSRERMKRIEEGIKELGSQILKEHPVENTQLQNEKLYLYYLQNGRDMYVDQELDINRLSDYDVDHIVPQSFLKDDSIDNKVLTRSDKNRGKSDNVPSEEVVKKMKNYWRQLLNAKLITQRKFDNLTKAERGGLSELDKAGFIKRQLVETRQITKHVAQILDSRMNTKYDENDKLIREVKVITLKSKLVSDFRKDFQFYKVREINNYHHAHDAYLNAVVGTALIKKYPKLESEFVYGDYKVYDVRKMIAKSEQEIGKATAKYFFYSNIMNFFKTEITLANGEIRKRPLIETNGETGEIVWDKGRDFATVRKVLSMPQVNIVKKTEVQTGGFSKESILPKRNSDKLIARKKDWDPKKYGGFDSPTVAYSVLVVAKVEKGKSKKLKSVKELLGITIMERSSFEKNPIDFLEAKGYKEVKKDLIIKLPKYSLFELENGRKRMLASAGELQKGNELALPSKYVNFLYLASHYEKLKGSPEDNEQKQLFVEQHKHYLDEIIEQISEFSKRVILADANLDKVLSAYNKHRDKPIREQAENIIHLFTLTNLGAPAAFKYFDTTIDRKRYTSTKEVLDATLIHQSITGLYETRIDLSQLGGDSGGSTNLSDIIEKETGKQLVIQESILMLPEEVEEVIGNKPESDILVHTAYDESTDENVMLLTSDAPEYKPWALVIQDSNGENKIKMLSGGSPKKKRKV

SEQ ID NO: 303 - protein, 4 aa, synthetic construct
  REGION 1..4: note = Synthetic Polypeptide
GGGS

SEQ ID NO: 304 - protein, 5 aa, synthetic construct
  REGION 1..5: note = Synthetic Polypeptide
GGGGS

SEQ ID NO: 305 - protein, 5 aa, synthetic construct
  REGION 1..5: note = Synthetic Polypeptide
EAAAK

SEQ ID NO: 306 - protein, 16 aa, synthetic construct
  REGION 1..16: note = Synthetic Polypeptide
SGSETPGTSESATPES

SEQ ID NO: 307 - protein, 4 aa, synthetic construct
  REGION 1..4: note = Synthetic Polypeptide
AGVF

SEQ ID NO: 308 - protein, 4 aa, synthetic construct
  REGION 1..4: note = Synthetic Polypeptide
GFLG

SEQ ID NO: 309 - protein, 5 aa, synthetic construct
  REGION 1..5: note = Synthetic Polypeptide
ALALA

SEQ ID NO: 310 - protein, 352 aa, synthetic construct
  REGION 1..352: note = Synthetic Polypeptide
  SITE 20: note = misc_feature - Xaa is C or S
  SITE 101: note = misc_feature - Xaa can be any naturally occurring amino acid
  SITE 106: note = misc_feature - Xaa is G or R
  SITE 223: note = misc_feature - Xaa is R or Q
  SITE 269: note = misc_feature - Xaa is F or C
MDYQVSSPIYDINYYTSEPXQKINVKQIAARLLPPLYSLVFIFGFVGNMLVILILINCKRLKSMTDIYLLNLAISDLFFLLTVPFWAHYAAAQWDFGNTMXQLLTXLYFIGFFSGIFFIILLTIDRYLAVVHAVFALKARTVTFGVVTSVITWVVAVFASLPGIIFTRSQKEGLHYTCSSHFPYSQYQFWKNFQTLKIVILGLVLPLLVMVICYSGILKTLLXCRNEKKRHRAVRLIFTIMIVYFLFWAPYNIVLLLNTFQEFFGLNNXSSSNRLDQAMQVTETLGMTHCCINPIIYAFVGEKFRNYLLVFFQKHIAKRFCKCCSIFQQEAPERASSVYTRSTGEQEISVGL

SEQ ID NO: 311 - DNA, 281 bp, synthetic construct
  misc_feature 1..281: note = Synthetic Polynucleotide
  source 1..281: mol_type = other DNA
ctgcagcaaaccttcccttcactacaaaacttcattgcttggccaaaaagagagttaattcaatgtagacatctatgtaggcaattaaaaacctattgatgtataaaacagtttgcattcatggagggcaactaaatacattctaggactttataaaagatcactttttatttatgcacagggtggaacaagatggattatcaagtgtcaagtccaatctatgacatcaattattatacatcggagccctgccaaaaaatcaatgtgaagcaaatcgcagc

SEQ ID NO: 312 - DNA, 1059 bp, synthetic construct
  misc_feature 1..1059: note = Synthetic Polynucleotide
  source 1..1059: mol_type = other DNA
atggattatcaagtgtcaagtccaatctatgacatcaattattatacatcggagccctgccaaaaaatcaatgtgaagcaaatcgcagcccgcctcctgcctccgctctactcactggtgttcatctttggttttgtgggcaacatgctggtcatcctcatcctgataaactgcaaaaggctgaagagcatgactgacatctacctgctcaacctggccatctctgacctgtttttccttcttactgtccccttctgggctcactatgctgccgcccagtgggactttggaaatacaatgtgtcaactcttgacagggctctattttataggcttcttctctggaatcttcttcatcatcctcctgacaatcgataggtacctggctgtcgtccatgctgtgtttgctttaaaagccaggacggtcacctttggggtggtgacaagtgtgatcacttgggtggtggctgtgtttgcgtctctcccaggaatcatctttaccagatctcaaaaagaaggtcttcattacacctgcagctctcattttccatacagtcagtatcaattctggaagaatttccagacattaaagatagtcatcttggggctggtcctgccgctgcttgtcatggtcatctgctactcgggaatcctaaaaactctgcttcggtgtcgaaatgagaagaagaggcacagggctgtgaggcttatcttcaccatcatgattgtttattttctcttctgggctccctacaacattgtccttctcctgaacaccttccaggaattctttggcctgaataattgcagtagctctaacaggttggaccaagctatgcaggtgacagagactcttgggatgacgcactgctgcatcaaccccatcatctatgcctttgtcggggagaagttcagaaactacctcttagtcttcttccaaaagcacattgccaaacgcttctgcaaatgctgttctattttccagcaagaggctcccgagcgagcaagctcagtttacacccgatccactggggagcaggaaatatctgtgggcttgtga

SEQ ID NO: 313 - protein, 352 aa, synthetic construct [sequence omitted]

SEQ ID NO: 314 - RNA, 100 nt, synthetic construct
  misc_feature 1..100: note = Synthetic Polynucleotide
  misc_feature 1..20: note = n is a, c, g, or u
  source 1..100: mol_type = other RNA
nnnnnnnnnnnnnnnnnnnngttttagagctagaaatagcaagttaaaataaggctagtccgttatcaacttgaaaaagtggcaccgactcggtgctttt

SEQ ID NO: 315 - protein, 1368 aa, Streptococcus pyogenes
MDKKYSIGLAIGTNSVGWAVITDEYKVPSKKFKVLGNTDRHSIKKNLIGALLFDSGETAEATRLKRTARRRYTRRKNRICYLQEIFSNEMAKVDDSFFHRLEESFLVEEDKKHERHPIFGNIVDEVAYHEKYPTIYHLRKKLVDSTDKADLRLIYLALAHMIKFRGHFLIEGDLNPDNSDVDKLFIQLVQTYNQLFEENPINASGVDAKAILSARLSKSRRLENLIAQLPGEKKNGLFGNLIALSLGLTPNFKSNFDLAEDAKLQLSKDTYDDDLDNLLAQIGDQYADLFLAAKNLSDAILLSDILRVNTEITKAPLSASMIKRYDEHHQDLTLLKALVRQQLPEKYKEIFFDQSKNGYAGYIDGGASQEEFYKFIKPILEKMDGTEELLVKLNREDLLRKQRTFDNGSIPHQIHLGELHAILRRQEDFYPFLKDNREKIEKILTFRIPYYVGPLARGNSRFAWMTRKSEETITPWNFEEVVDKGASAQSFIERMTNFDKNLPNEKVLPKHSLLYEYFTVYNELTKVKYVTEGMRKPAFLSGEQKKAIVDLLFKTNRKVTVKQLKEDYFKKIECFDSVEISGVEDRFNASLGTYHDLLKIIKDKDFLDNEENEDILEDIVLTLTLFEDREMIEERLKTYAHLFDDKVMKQLKRRRYTGWGRLSRKLINGIRDKQSGKTILDFLKSDGFANRNFMQLIHDDSLTFKEDIQKAQVSGQGDSLHEHIANLAGSPAIKKGILQTVKVVDELVKVMGRHKPENIVIEMARENQTTQKGQKNSRERMKRIEEGIKELGSQILKEHPVENTQLQNEKLYLYYLQNGRDMYVDQELDINRLSDYDVDHIVPQSFLKDDSIDNKVLTRSDKNRGKSDNVPSEEVVKKMKNYWRQLLNAKLITQRKFDNLTKAERGGLSELDKAGFIKRQLVETRQITKHVAQILDSRMNTKYDENDKLIREVKVITLKSKLVSDFRKDFQFYKVREINNYHHAHDAYLNAVVGTALIKKYPKLESEFVYGDYKVYDVRKMIAKSEQEIGKATAKYFFYSNIMNFFKTEITLANGEIRKRPLIETNGETGEIVWDKGRDFATVRKVLSMPQVNIVKKTEVQTGGFSKESILPKRNSDKLIARKKDWDPKKYGGFVSPTVAYSVLVVAKVEKGKSKKLKSVKELLGITIMERSSFEKNPIDFLEAKGYKEVKKDLIIKLPKYSLFELENGRKRMLASAGELQKGNELALPSKYVNFLYLASHYEKLKGSPEDNEQKQLFVEQHKHYLDEIIEQISEFSKRVILADANLDKVLSAYNKHRDKPIREQAENIIHLFTLTNLGAPAAFKYFDTTIDRKQYRSTKEVLDATLIHQSITGLYETRIDLSQLGGD

SEQ ID NO: 316 - protein, 1368 aa, Streptococcus pyogenes
MDKKYSIGLDIGTNSVGWAVITDEYKVPSKKFKVLGNTDRHSIKKNLIGALLFDSGETAEATRLKRTARRRYTRRKNRICYLQEIFSNEMAKVDDSFFHRLEESFLVEEDKKHERHPIFGNIVDEVAYHEKYPTIYHLRKKLVDSTDKADLRLIYLALAHMIKFRGHFLIEGDLNPDNSDVDKLFIQLVQTYNQLFEENPINASGVDAKAILSARLSKSRRLENLIAQLPGEKKNGLFGNLIALSLGLTPNFKSNFDLAEDAKLQLSKDTYDDDLDNLLAQIGDQYADLFLAAKNLSDAILLSDILRVNTEITKAPLSASMIKRYDEHHQDLTLLKALVRQQLPEKYKEIFFDQSKNGYAGYIDGGASQEEFYKFIKPILEKMDGTEELLVKLNREDLLRKQRTFDNGSIPHQIHLGELHAILRRQEDFYPFLKDNREKIEKILTFRIPYYVGPLARGNSRFAWMTRKSEETITPWNFEEVVDKGASAQSFIERMTNFDKNLPNEKVLPKHSLLYEYFTVYNELTKVKYVTEGMRKPAFLSGEQKKAIVDLLFKTNRKVTVKQLKEDYFKKIECFDSVEISGVEDRFNASLGTYHDLLKIIKDKDFLDNEENEDILEDIVLTLTLFEDREMIEERLKTYAHLFDDKVMKQLKRRRYTGWGRLSRKLINGIRDKQSGKTILDFLKSDGFANRNFMQLIHDDSLTFKEDIQKAQVSGQGDSLHEHIANLAGSPAIKKGILQTVKVVDELVKVMGRHKPENIVIEMARENQTTQKGQKNSRERMKRIEEGIKELGSQILKEHPVENTQLQNEKLYLYYLQNGRDMYVDQELDINRLSDYDVDHIVPQSFLKDDSIDNKVLTRSDKNRGKSDNVPSEEVVKKMKNYWRQLLNAKLITQRKFDNLTKAERGGLSELDKAGFIKRQLVETRQITKHVAQILDSRMNTKYDENDKLIREVKVITLKSKLVSDFRKDFQFYKVREINNYHHAHDAYLNAVVGTALIKKYPKLESEFVYGDYKVYDVRKMIAKSEQEIGKATAKYFFYSNIMNFFKTEITLANGEIRKRPLIETNGETGEIVWDKGRDFATVRKVLSMPQVNIVKKTEVQTGGFSKESILPKRNSDKLIARKKDWDPKKYGGFESPTVAYSVLVVAKVEKGKSKKLKSVKELLGITIMERSSFEKNPIDFLEAKGYKEVKKDLIIKLPKYSLFELENGRKRMLASAGELQKGNELALPSKYVNFLYLASHYEKLKGSPEDNEQKQLFVEQHKHYLDEIIEQISEFSKRVILADANLDKVLSAYNKHRDKPIREQAENIIHLFTLTNLGAPAAFKYFDTTIDRKQYRSTKEVLDATLIHQSITGLYETRIDLSQLGGD

SEQ ID NO: 317 - protein, 1368 aa, Streptococcus pyogenes
MDKKYSIGLAIGTNSVGWAVITDEYKVPSKKFKVLGNTDRHSIKKNLIGALLFDSGETAEATRLKRTARRRYTRRKNRICYLQEIFSNEMAKVDDSFFHRLEESFLVEEDKKHERHPIFGNIVDEVAYHEKYPTIYHLRKKLVDSTDKADLRLIYLALAHMIKFRGHFLIEGDLNPDNSDVDKLFIQLVQTYNQLFEENPINASGVDAKAILSARLSKSRRLENLIAQLPGEKKNGLFGNLIALSLGLTPNFKSNFDLAEDAKLQLSKDTYDDDLDNLLAQIGDQYADLFLAAKNLSDAILLSDILRVNTEITKAPLSASMIKRYDEHHQDLTLLKALVRQQLPEKYKEIFFDQSKNGYAGYIDGGASQEEFYKFIKPILEKMDGTEELLVKLNREDLLRKQRTFDNGSIPHQIHLGELHAILRRQEDFYPFLKDNREKIEKILTFRIPYYVGPLARGNSRFAWMTRKSEETITPWNFEEVVDKGASAQSFIERMTNFDKNLPNEKVLPKHSLLYEYFTVYNELTKVKYVTEGMRKPAFLSGEQKKAIVDLLFKTNRKVTVKQLKEDYFKKIECFDSVEISGVEDRFNASLGTYHDLLKIIKDKDFLDNEENEDILEDIVLTLTLFEDREMIEERLKTYAHLFDDKVMKQLKRRRYTGWGRLSRKLINGIRDKQSGKTILDFLKSDGFANRNFMQLIHDDSLTFKEDIQKAQVSGQGDSLHEHIANLAGSPAIKKGILQTVKVVDELVKVMGRHKPENIVIEMARENQTTQKGQKNSRERMKRIEEGIKELGSQILKEHPVENTQLQNEKLYLYYLQNGRDMYVDQELDINRLSDYDVDHIVPQSFLKDDSIDNKVLTRSDKNRGKSDNVPSEEVVKKMKNYWRQLLNAKLITQRKFDNLTKAERGGLSELDKAGFIKRQLVETRQITKHVAQILDSRMNTKYDENDKLIREVKVITLKSKLVSDFRKDFQFYKVREINNYHHAHDAYLNAVVGTALIKKYPKLESEFVYGDYKVYDVRKMIAKSEQEIGKATAKYFFYSNIMNFFKTEITLANGEIRKRPLIETNGETGEIVWDKGRDFATVRKVLSMPQVNIVKKTEVQTGGFSKESILPKRNSDKLIARKKDWDPKKYGGFESPTVAYSVLVVAKVEKGKSKKLKSVKELLGITIMERSSFEKNPIDFLEAKGYKEVKKDLIIKLPKYSLFELENGRKRMLASAGELQKGNELALPSKYVNFLYLASHYEKLKGSPEDNEQKQLFVEQHKHYLDEIIEQISEFSKRVILADANLDKVLSAYNKHRDKPIREQAENIIHLFTLTNLGAPAAFKYFDTTIDRKQYRSTKEVLDATLIHQSITGLYETRIDLSQLGGD

SEQ ID NO: 318 - protein, 1053 aa, Staphylococcus aureus
MKRNYILGLDIGITSVGYGIIDYETRDVIDAGVRLFKEANVENNEGRRSKRGARRLKRRRRHRIQRVKKLLFDYNLLTDHSELSGINPYEARVKGLSQKLSEEEFSAALLHLAKRRGVHNVNEVEEDTGNELSTKEQISRNSKALEEKYVAELQLERLKKDGEVRGSINRFKTSDYVKEAKQLLKVQKAYHQLDQSFIDTYIDLLETRRTYYEGPGEGSPFGWKDIKEWYEMLMGHCTYFPEELRSVKYAYNADLYNALNDLNNLVITRDENEKLEYYEKFQIIENVFKQKKKPTLKQIAKEILVNEEDIKGYRVTSTGKPEFTNLKVYHDIKDITARKEIIENAELLDQIAKILTIYQSSEDIQEELTNLNSELTQEEIEQISNLKGYTGTHNLSLKAINLILDELWHTNDNQIAIFNRLKLVPKKVDLSQQKEIPTTLVDDFILSPVVKRSFIQSIKVINAIIKKYGLPNDIIIELAREKNSKDAQKMINEMQKRNRQTNERIEEIIRTTGKENAKYLIEKIKLHDMQEGKCLYSLEAIPLEDLLNNPFNYEVDHIIPRSVSFDNSFNNKVLVKQEENSKKGNRTPFQYLSSSDSKISYETFKKHILNLAKGKGRISKTKKEYLLEERDINRFSVQKDFINRNLVDTRYATRGLMNLLRSYFRVNNLDVKVKSINGGFTSFLRRKWKFKKERNKGYKHHAEDALIIANADFIFKEWKKLDKAKKVMENQMFEEKQAESMPEIETEQEYKEIFITPHQIKHIKDFKDYKYSHRVDKKPNRKLINDTLYSTRKDDKGNTLIVNNLNGLYDKDNDKLKKLINKSPEKLLMYHHDPQTYQKLKLIMEQYGDEKNPLYKYYEETGNYLTKYSKKDNGPVIKKIKYYGNKLNAHLDITDDYPNSRNKVVKLSLKPYRFDVYLDNGVYKFVTVKNLDVIKKENYYEVNSKCYEEAKKLKKISNQAEFIASFYKNDLIKINGELYRVIGVNNDLLNRIEVNMIDITYREYLENMNDKRPPHIIKTIASKTQSIKKYSTDILGNLYEVKSKKHPQIIKKG

SEQ ID NO: 319 - protein, 1053 aa, Staphylococcus aureus
MKRNYILGLAIGITSVGYGIIDYETRDVIDAGVRLFKEANVENNEGRRSKRGARRLKRRRRHRIQRVKKLLFDYNLLTDHSELSGINPYEARVKGLSQKLSEEEFSAALLHLAKRRGVHNVNEVEEDTGNELSTKEQISRNSKALEEKYVAELQLERLKKDGEVRGSINRFKTSDYVKEAKQLLKVQKAYHQLDQSFIDTYIDLLETRRTYYEGPGEGSPFGWKDIKEWYEMLMGHCTYFPEELRSVKYAYNADLYNALNDLNNLVITRDENEKLEYYEKFQIIENVFKQKKKPTLKQIAKEILVNEEDIKGYRVTSTGKPEFTNLKVYHDIKDITARKEIIENAELLDQIAKILTIYQSSEDIQEELTNLNSELTQEEIEQISNLKGYTGTHNLSLKAINLILDELWHTNDNQIAIFNRLKLVPKKVDLSQQKEIPTTLVDDFILSPVVKRSFIQSIKVINAIIKKYGLPNDIIIELAREKNSKDAQKMINEMQKRNRQTNERIEEIIRTTGKENAKYLIEKIKLHDMQEGKCLYSLEAIPLEDLLNNPFNYEVDHIIPRSVSFDNSFNNKVLVKQEENSKKGNRTPFQYLSSSDSKISYETFKKHILNLAKGKGRISKTKKEYLLEERDINRFSVQKDFINRNLVDTRYATRGLMNLLRSYFRVNNLDVKVKSINGGFTSFLRRKWKFKKERNKGYKHHAEDALIIANADFIFKEWKKLDKAKKVMENQMFEEKQAESMPEIETEQEYKEIFITPHQIKHIKDFKDYKYSHRVDKKPNRKLINDTLYSTRKDDKGNTLIVNNLNGLYDKDNDKLKKLINKSPEKLLMYHHDPQTYQKLKLIMEQYGDEKNPLYKYYEETGNYLTKYSKKDNGPVIKKIKYYGNKLNAHLDITDDYPNSRNKVVKLSLKPYRFDVYLDNGVYKFVTVKNLDVIKKENYYEVNSKCYEEAKKLKKISNQAEFIASFYKNDLIKINGELYRVIGVNNDLLNRIEVNMIDITYREYLENMNDKRPPHIIKTIASKTQSIKKYSTDILGNLYEVKSKKHPQIIKKG

SEQ ID NO: 320 - protein, 1121 aa, Streptococcus thermophilus
MSDLVLGLDIGIGSVGVGILNKVTGEIIHKNSRIFPAAQAENNLVRRTNRQGRRLTRRKKHRRVRLNRLFEESGLITDFTKISINLNPYQLRVKGLTDELSNEELFIALKNMVKHRGISYLDDASDDGNSSIGDYAQIVKENSKQLETKTPGQIQLERYQTYGQLRGDFTVEKDGKKHRLINVFPTSAYRSEALRILQTQQEFNPQITDEFINRYLEILTGKRKYYHGPGNEKSRTDYGRYRTSGETLDNIFGILIGKCTFYPDEFRAAKASYTAQEFNLLNDLNNLTVPTETKKLSKEQKNQIINYVKNEKAMGPAKLFKYIAKLLSCDVADIKGYRIDKSGKAEIHTFEAYRKMKTLETLDIEQMDRETLDKLAYVLTLNTEREGIQEALEHEFADGSFSQKQVDELVQFRKANSSIFGKGWHNFSVKLMMELIPELYETSEEQMTILTRLGKQKTTSSSNKTKYIDEKLLTEEIYNPVVAKSVRQAIKIVNAAIKEYGDFDNIVIEMARETNEDDEKKAIQKIQKANKDEKDAAMLKAANQYNGKAELPHSVFHGHKQLATKIRLWHQQGERCLYTGKTISIHDLINNSNQFEVDHILPLSITFDDSLANKVLVYATANQEKGQRTPYQALDSMDDAWSFRELKAFVRESKTLSNKKKEYLLTEEDISKFDVRKKFIERNLVDTRYASRVVLNALQEHFRAHKIDTKVSVVRGQFTSQLRRHWGIEKTRDTYHHHAVDALIIAASSQLNLWKKQKNTLVSYSEDQLLDIETGELISDDEYKESVFKAPYQHFVDTLKSKEFEDSILFSYQVDSKFNRKISDATIYATRQAKVGKDKADETYVLGKIKDIYTQDGYDAFMKIYKKDKSKFLMYRHDPQTFEKVIEPILENYPNKQINEKGKEVPCNPFLKYKEEHGYIRKYSKKGNGPEIKSLKYYDSKLGNHIDITPKDSNNKVVLQSVSPWRADVYFNKTTGKYEILGLKYADLQFEKGTGTYKISQEKYNDIKKKEGVDSDSEFKFTLYKNDLLLVKDTETKEQQLFRFLSRTMPKQKHYVELKPYDKQKFEGGEALIKVLGNVANSGQCKKGLGKSNISIYKVRTDVLGNQHIIKNEGDKPKLDF

SEQ ID NO: 321 - protein, 1121 aa, Streptococcus thermophilus
MSDLVLGLAIGIGSVGVGILNKVTGEIIHKNSRIFPAAQAENNLVRRTNRQGRRLTRRKKHRRVRLNRLFEESGLITDFTKISINLNPYQLRVKGLTDELSNEELFIALKNMVKHRGISYLDDASDDGNSSIGDYAQIVKENSKQLETKTPGQIQLERYQTYGQLRGDFTVEKDGKKHRLINVFPTSAYRSEALRILQTQQEFNPQITDEFINRYLEILTGKRKYYHGPGNEKSRTDYGRYRTSGETLDNIFGILIGKCTFYPDEFRAAKASYTAQEFNLLNDLNNLTVPTETKKLSKEQKNQIINYVKNEKAMGPAKLFKYIAKLLSCDVADIKGYRIDKSGKAEIHTFEAYRKMKTLETLDIEQMDRETLDKLAYVLTLNTEREGIQEALEHEFADGSFSQKQVDELVQFRKANSSIFGKGWHNFSVKLMMELIPELYETSEEQMTILTRLGKQKTTSSSNKTKYIDEKLLTEEIYNPVVAKSVRQAIKIVNAAIKEYGDFDNIVIEMARETNEDDEKKAIQKIQKANKDEKDAAMLKAANQYNGKAELPHSVFHGHKQLATKIRLWHQQGERCLYTGKTISIHDLINNSNQFEVDHILPLSITFDDSLANKVLVYATANQEKGQRTPYQALDSMDDAWSFRELKAFVRESKTLSNKKKEYLLTEEDISKFDVRKKFIERNLVDTRYASRVVLNALQEHFRAHKIDTKVSVVRGQFTSQLRRHWGIEKTRDTYHHHAVDALIIAASSQLNLWKKQKNTLVSYSEDQLLDIETGELISDDEYKESVFKAPYQHFVDTLKSKEFEDSILFSYQVDSKFNRKISDATIYATRQAKVGKDKADETYVLGKIKDIYTQDGYDAFMKIYKKDKSKFLMYRHDPQTFEKVIEPILENYPNKQINEKGKEVPCNPFLKYKEEHGYIRKYSKKGNGPEIKSLKYYDSKLGNHIDITPKDSNNKVVLQSVSPWRADVYFNKTTGKYEILGLKYADLQFEKGTGTYKISQEKYNDIKKKEGVDSDSEFKFTLYKNDLLLVKDTETKEQQLFRFLSRTMPKQKHYVELKPYDKQKFEGGEALIKVLGNVANSGQCKKGLGKSNISIYKVRTDVLGNQHIIKNEGDKPKLDF

SEQ ID NO: 322 - protein, 1388 aa, Streptococcus thermophilus
MTKPYSIGLDIGTNSVGWAVITDNYKVPSKKMKVLGNTSKKYIKKNLLGVLLFDSGITAEGRRLKRTARRRYTRRRNRILYLQEIFSTEMATLDDAFFQRLDDSFLVPDDKRDSKYPIFGNLVEEKVYHDEFPTIYHLRKYLADSTKKADLRLVYLALAHMIKYRGHFLIEGEFNSKNNDIQKNFQDFLDTYNAIFESDLSLENSKQLEEIVKDKISKLEKKDRILKLFPGEKNSGIFSEFLKLIVGNQADFRKCFNLDEKASLHFSKESYDEDLETLLGYIGDDYSDVFLKAKKLYDAILLSGFLTVTDNETEAPLSSAMIKRYNEHKEDLALLKEYIRNISLKTYNEVFKDDTKNGYAGYIDGKTNQEDFYVYLKNLLAEFEGADYFLEKIDREDFLRKQRTFDNGSIPYQIHLQEMRAILDKQAKFYPFLAKNKERIEKILTFRIPYYVGPLARGNSDFAWSIRKRNEKITPWNFEDVIDKESSAEAFINRMTSFDLYLPEEKVLPKHSLLYETFNVYNELTKVRFIAESMRDYQFLDSKQKKDIVRLYFKDKRKVTDKDIIEYLHAIYGYDGIELKGIEKQFNSSLSTYHDLLNIINDKEFLDDSSNEAIIEEIIHTLTIFEDREMIKQRLSKFENIFDKSVLKKLSRRHYTGWGKLSAKLINGIRDEKSGNTILDYLIDDGISNRNFMQLIHDDALSFKKKIQKAQIIGDEDKGNIKEVVKSLPGSPAIKKGILQSIKIVDELVKVMGGRKPESIVVEMARENQYTNQGKSNSQQRLKRLEKSLKELGSKILKENIPAKLSKIDNNALQNDRLYLYYLQNGKDMYTGDDLDIDRLSNYDIDHIIPQAFLKDNSIDNKVLVSSASNRGKSDDFPSLEVVKKRKTFWYQLLKSKLISQRKFDNLTKAERGGLLPEDKAGFIQRQLVETRQITKHVARLLDEKFNNKKDENNRAVRTVKIITLKSTLVSQFRKDFELYKVREINDFHHAHDAYLNAVIASALLKKYPKLEPEFVYGDYPKYNSFRERKSATEKVYFYSNIMNIFKKSISLADGRVIERPLIEVNEETGESVWNKESDLATVRRVLSYPQVNVVKKVEEQNHGLDRGKPKGLFNANLSSKPKPNSNENLVGAKEYLDPKKYGGYAGISNSFAVLVKGTIEKGAKKKITNVLEFQGISILDRINYRKDKLNFLLEKGYKDIELIIELPKYSLFELSDGSRRMLASILSTNNKRGEIHKGNQIFLSQKFVKLLYHAKRISNTINENHRKYVENHKKEFEELFYYILEFNENYVGAKKNGKLLNSAFQSWQNHSIDELCSSFIGPTGSERKGLFELTSRGSAADFEFLGVKIPRYRDYTPSSLLKDATLIHQSVTGLYETRIDLAKLGEG

SEQ ID NO: 323 - protein, 1388 aa, Streptococcus thermophilus
MTKPYSIGLAIGTNSVGWAVITDNYKVPSKKMKVLGNTSKKYIKKNLLGVLLFDSGITAEGRRLKRTARRRYTRRRNRILYLQEIFSTEMATLDDAFFQRLDDSFLVPDDKRDSKYPIFGNLVEEKVYHDEFPTIYHLRKYLADSTKKADLRLVYLALAHMIKYRGHFLIEGEFNSKNNDIQKNFQDFLDTYNAIFESDLSLENSKQLEEIVKDKISKLEKKDRILKLFPGEKNSGIFSEFLKLIVGNQADFRKCFNLDEKASLHFSKESYDEDLETLLGYIGDDYSDVFLKAKKLYDAILLSGFLTVTDNETEAPLSSAMIKRYNEHKEDLALLKEYIRNISLKTYNEVFKDDTKNGYAGYIDGKTNQEDFYVYLKNLLAEFEGADYFLEKIDREDFLRKQRTFDNGSIPYQIHLQEMRAILDKQAKFYPFLAKNKERIEKILTFRIPYYVGPLARGNSDFAWSIRKRNEKITPWNFEDVIDKESSAEAFINRMTSFDLYLPEEKVLPKHSLLYETFNVYNELTKVRFIAESMRDYQFLDSKQKKDIVRLYFKDKRKVTDKDIIEYLHAIYGYDGIELKGIEKQFNSSLSTYHDLLNIINDKEFLDDSSNEAIIEEIIHTLTIFEDREMIKQRLSKFENIFDKSVLKKLSRRHYTGWGKLSAKLINGIRDEKSGNTILDYLIDDGISNRNFMQLIHDDALSFKKKIQKAQIIGDEDKGNIKEVVKSLPGSPAIKKGILQSIKIVDELVKVMGGRKPESIVVEMARENQYTNQGKSNSQQRLKRLEKSLKELGSKILKENIPAKLSKIDNNALQNDRLYLYYLQNGKDMYTGDDLDIDRLSNYDIDHIIPQAFLKDNSIDNKVLVSSASNRGKSDDFPSLEVVKKRKTFWYQLLKSKLISQRKFDNLTKAERGGLLPEDKAGFIQRQLVETRQITKHVARLLDEKFNNKKDENNRAVRTVKIITLKSTLVSQFRKDFELYKVREINDFHHAHDAYLNAVIASALLKKYPKLEPEFVYGDYPKYNSFRERKSATEKVYFYSNIMNIFKKSISLADGRVIERPLIEVNEETGESVWNKESDLATVRRVLSYPQVNVVKKVEEQNHGLDRGKPKGLFNANLSSKPKPNSNENLVGAKEYLDPKKYGGYAGISNSFAVLVKGTIEKGAKKKITNVLEFQGISILDRINYRKDKLNFLLEKGYKDIELIIELPKYSLFELSDGSRRMLASILSTNNKRGEIHKGNQIFLSQKFVKLLYHAKRISNTINENHRKYVENHKKEFEELFYYILEFNENYVGAKKNGKLLNSAFQSWQNHSIDELCSSFIGPTGSERKGLFELTSRGSAADFEFLGVKIPRYRDYTPSSLLKDATLIHQSVTGLYETRIDLAKLGEG

SEQ ID NO: 324 - protein, 36 aa, synthetic construct
  REGION 1..36: note = Synthetic Polypeptide
  SITE 2: note = misc_feature - Xaa can be any naturally occurring amino acid
  REGION 4..26: note = misc_feature - Xaa can be any naturally occurring amino acid
  REGION 27..29: note = misc_feature - Xaa may be absent
  REGION 32..33: note = misc_feature - Xaa can be any naturally occurring amino acid
  REGION 34..35: note = misc_feature - Xaa may be absent
HXEXXXXXXXXXXXXXXXXXXXXXXXXXXPCXXXXC

SEQ ID NO: 325 - DNA, 3686 bp, Homo sapiens
  source 1..3686: mol_type = genomic DNA
cttcagatagattatatctggagtgaagaatcctgccacctatgtatctggcatagtattctgtgtagtgggatgagcagagaacaaaaacaaaataatccagtgagaaaagcccgtaaataaaccttcagaccagagatctattctctagcttattttaagctcaacttaaaaagaagaactgttctctgattcttttcgccttcaatacacttaatgatttaactccaccctccttcaaaagaaacagcatttcctacttttatactgtctatatgattgatttgcacagctcatctggccagaagagctgagacatccgttcccctacaagaaactctccccgggtggaacaagatggattatcaagtgtcaagtccaatctatgacatcaattattatacatcggagccctgccaaaaaatcaatgtgaagcaaatcgcagcccgcctcctgcctccgctctactcactggtgttcatctttggttttgtgggcaacatgctggtcatcctcatcctgataaactgcaaaaggctgaagagcatgactgacatctacctgctcaacctggccatctctgacctgtttttccttcttactgtccccttctgggctcactatgctgccgcccagtgggactttggaaatacaatgtgtcaactcttgacagggctctattttataggcttcttctctggaatcttcttcatcatcctcctgacaatcgataggtacctggctgtcgtccatgctgtgtttgctttaaaagccaggacggtcacctttggggtggtgacaagtgtgatcacttgggtggtggctgtgtttgcgtctctcccaggaatcatctttaccagatctcaaaaagaaggtcttcattacacctgcagctctcattttccatacagtcagtatcaattctggaagaatttccagacattaaagatagtcatcttggggctggtcctgccgctgcttgtcatggtcatctgctactcgggaatcctaaaaactctgcttcggtgtcgaaatgagaagaagaggcacagggctgtgaggcttatcttcaccatcatgattgtttattttctcttctgggctccctacaacattgtccttctcctgaacaccttccaggaattctttggcctgaataattgcagtagctctaacaggttggaccaagctatgcaggtgacagagactcttgggatgacgcactgctgcatcaaccccatcatctatgcctttgtcggggagaagttcagaaactacctcttagtcttcttccaaaagcacattgccaaacgcttctgcaaatgctgttctattttccagcaagaggctcccgagcgagcaagctcagtttacacccgatccactggggagcaggaaatatctgtgggcttgtgacacggactcaagtgggctggtgacccagtcagagttgtgcacatggcttagttttcatacacagcctgggctgggggtggggtgggagaggtcttttttaaaaggaagttactgttatagagggtctaagattcatccatttatttggcatctgtttaaagtagattagatcttttaagcccatcaattatagaaagccaaatcaaaatatgttgatgaaaaatagcaacctttttatctccccttcacatgcatcaagttattgacaaactctcccttcactccgaaagttccttatgtatatttaaaagaaagcctcagagaattgctgattcttgagtttagtgatctgaacagaaataccaaaattatttcagaaatgtacaactttttacctagtacaaggcaacatataggttgtaaatgtgtttaaaacaggtctttgtcttgctatggggagaaaagacatgaatatgattagtaaagaaatgacacttttcatgtgtgatttcccctccaaggtatggttaataagtttcactgacttagaaccaggcgagagacttgtggcctgggagagctggggaagcttcttaaatgagaaggaatttgagttggatcatctattgctggcaaagacagaagcctcactgcaagcactgcatgggcaagcttggctgtagaaggagacagagctggttgggaagacatggggaggaaggacaaggctagatcatgaagaaccttgacggcattgctccgtctaagtcatgagctgagcagggagatcctggttggtgttgcagaaggtttactctgtggccaaaggagggtcaggaaggatgagcatttagggcaaggagaccaccaacagccctcaggtcagggtgaggatggcctctgctaagctcaaggcgtgaggatgggaaggagggaggtattcgtaaggatgggaaggagggaggtattcgtgcagcatatgaggatgcagagtcagcagaactggggtggatttgggttggaagtgagggtcagagaggagtcagagagaatccctagtcttcaagcagattggagaaacccttgaaaagacatcaagcacagaaggaggaggaggaggtttaggtcaagaagaagatggattggtgtaaaaggatgggtctggtttgcagagcttgaacacagtctcacccagactccaggctgtctttcactgaatgcttctgacttcatagatttccttcccatcccagctgaaatactgaggggtctccaggaggagactagatttatgaatacacgaggtatgaggtctaggaacatacttcagctcacacatgagatctaggtgaggattgattacctagtagtcatttcatgggttgttgggaggattctatgaggcaaccacaggcagcatttagcacatactacacattcaataagcatcaaactcttagttactcattcagggatagcactgagcaaagcattgagcaaaggggtcccatagaggtgagggaagcctgaaaaactaagatgctgcctgcccagtgcacacaagtgtaggtatcattttctgcatttaaccgtcaataggcaaaggggggaagggacatattcatttggaaataagctgccttgagccttaaaacccacaaaagtacaatttaccagcctccgtatttcagactgaatgggggtggggggggcgccttaggtacttattccagatgccttctccagacaaaccagaagcaacagaaaaaatcgtctctccctccctttgaaatgaatataccccttagtgtttgggtatattcatttcaaagggagagagagaggtttttttctgttctgtctcatatgattgtgcacatacttgagactgttttgaatttgggggatggctaaaaccatcatagtacaggtaaggtgagggaatagtaagtggtgagaactactcagggaatgaaggtgtcagaataataagaggtgctactgactttctcagcctctgaatatgaacggtgagcattgtggctgtcagcaggaagcaacgaagggaaatgtctttccttttgctcttaagttgtggagagtgcaacagtagcataggaccctaccctctgggccaagtcaaagacattctgacatcttagtatttgcatattcttatgtatgtgaaagttacaaattgcttgaaagaaaatatgcatctaataaaaaacaccttctaaaataaaaaaaaaaaaaaaaaaaaaaaaaaa

SEQ ID NO: 326 - DNA, 3451 bp, Homo sapiens
  source 1..3451: mol_type = genomic DNA
cttcagatagattatatctggagtgaagaatcctgccacctatgtatctggcatagtctcatctggccagaagagctgagacatccgttcccctacaagaaactctccccgggtggaacaagatggattatcaagtgtcaagtccaatctatgacatcaattattatacatcggagccctgccaaaaaatcaatgtgaagcaaatcgcagcccgcctcctgcctccgctctactcactggtgttcatctttggttttgtgggcaacatgctggtcatcctcatcctgataaactgcaaaaggctgaagagcatgactgacatctacctgctcaacctggccatctctgacctgtttttccttcttactgtccccttctgggctcactatgctgccgcccagtgggactttggaaatacaatgtgtcaactcttgacagggctctattttataggcttcttctctggaatcttcttcatcatcctcctgacaatcgataggtacctggctgtcgtccatgctgtgtttgctttaaaagccaggacggtcacctttggggtggtgacaagtgtgatcacttgggtggtggctgtgtttgcgtctctcccaggaatcatctttaccagatctcaaaaagaaggtcttcattacacctgcagctctcattttccatacagtcagtatcaattctggaagaatttccagacattaaagatagtcatcttggggctggtcctgccgctgcttgtcatggtcatctgctactcgggaatcctaaaaactctgcttcggtgtcgaaatgagaagaagaggcacagggctgtgaggcttatcttcaccatcatgattgtttattttctcttctgggctccctacaacattgtccttctcctgaacaccttccaggaattctttggcctgaataattgcagtagctctaacaggttggaccaagctatgcaggtgacagagactcttgggatgacgcactgctgcatcaaccccatcatctatgcctttgtcggggagaagttcagaaactacctcttagtcttcttccaaaagcacattgccaaacgcttctgcaaatgctgttctattttccagcaagaggctcccgagcgagcaagctcagtttacacccgatccactggggagcaggaaatatctgtgggcttgtgacacggactcaagtgggctggtgacccagtcagagttgtgcacatggcttagttttcatacacagcctgggctgggggtggggtgggagaggtcttttttaaaaggaagttactgttatagagggtctaagattcatccatttatttggcatctgtttaaagtagattagatcttttaagcccatcaattatagaaagccaaatcaaaatatgttgatgaaaaatagcaacctttttatctccccttcacatgcatcaagttattgacaaactctcccttcactccgaaagttccttatgtatatttaaaagaaagcctcagagaattgctgattcttgagtttagtgatctgaacagaaataccaaaattatttcagaaatgtacaactttttacctagtacaaggcaacatataggttgtaaatgtgtttaaaacaggtctttgtcttgctatggggagaaaagacatgaatatgattagtaaagaaatgacacttttcatgtgtgatttcccctccaaggtatggttaataagtttcactgacttagaaccaggcgagagacttgtggcctgggagagctggggaagcttcttaaatgagaaggaatttgagttggatcatctattgctggcaaagacagaagcctcactgcaagcactgcatgggcaagcttggctgtagaaggagacagagctggttgggaagacatggggaggaaggacaaggctagatcatgaagaaccttgacggcattgctccgtctaagtcatgagctgagcagggagatcctggttggtgttgcagaaggtttactctgtggccaaaggagggtcaggaaggatgagcatttagggcaaggagaccaccaacagccctcaggtcagggtgaggatggcctctgctaagctcaaggcgtgaggatgggaaggagggaggtattcgtaaggatgggaaggagggaggtattcgtgcagcatatgaggatgcagagtcagcagaactggggtggatttgggttggaagtgagggtcagagaggagtcagagagaatccctagtcttcaagcagattggagaaacccttgaaaagacatcaagcacagaaggaggaggaggaggtttaggtcaagaagaagatggattggtgtaaaaggatgggtctggtttgcagagcttgaacacagtctcacccagactccaggctgtctttcactgaatgcttctgacttcatagatttccttcccatcccagctgaaatactgaggggtctccaggaggagactagatttatgaatacacgaggtatgaggtctaggaacatacttcagctcacacatgagatctaggtgaggattgattacctagtagtcatttcatgggttgttgggaggattctatgaggcaaccacaggcagcatttagcacatactacacattcaataagcatcaaactcttagttactcattcagggatagcactgagcaaagcattgagcaaaggggtcccatagaggtgagggaagcctgaaaaactaagatgctgcctgcccagtgcacacaagtgtaggtatcattttctgcatttaaccgtcaataggcaaaggggggaagggacatattcatttggaaataagctgccttgagccttaaaacccacaaaagtacaatttaccagcctccgtatttcagactgaatgggggtggggggggcgccttaggtacttattccagatgccttctccagacaaaccagaagcaacagaaaaaatcgtctctccctccctttgaaatgaatataccccttagtgtttgggtatattcatttcaaagggagagagagaggtttttttctgttctgtctcatatgattgtgcacatacttgagactgttttgaatttgggggatggctaaaaccatcatagtacaggtaaggtgagggaatagtaagtggtgagaactactcagggaatgaaggtgtcagaataataagaggtgctactgactttctcagcctctgaatatgaacggtgagcattgtggctgtcagcaggaagcaacgaagggaaatgtctttccttttgctcttaagttgtggagagtgcaacagtagcataggaccctaccctctgggccaagtcaaagacattctgacatcttagtatttgcatattcttatgtatgtgaaagttacaaattgcttgaaagaaaatatgcatctaataaaaaacaccttctaaaataaaaaaaaaaaaaaaaaaaaaaaaaaa

SEQ ID NO: 327 - protein, 352 aa, Homo sapiens [sequence omitted]

SEQ ID NO: 328 - protein, 354 aa, Mus musculus
MDFQGSVPTYSYDIDYGMSAPCQKINVKQIAAQLLPPLYSLVFIFGFVGNMMVFLILISCKKLKSVTDIYLLNLAISDLLFLLTLPFWAHYAANEWVFGNIMCKVFTGLYHIGYFGGIFFIILLTIDRYLAIVHAVFALKVRTVNFGVITSVVTWAVAVFASLPEIIFTRSQKEGFHYTCSPHFPHTQYHFWKSFQTLKMVILSLILPLLVMVICYSGILHTLFRCRNEKKRHRAVRLIFAIMIVYFLFWTPYNIVLLLTTFQEFFGLNNCSSSNRLDQAMQATETLGMTHCCLNPVIYAFVGEKFRSYLSVFFRKHMVKRFCKRCSIFQQDNPDRASSVYTRSTGEHEVSTGL

SEQ ID NO: 329 - protein, 354 aa, Rattus norvegicus
MDFQGSIPTYIYDIDYSMSAPCQKFNVKQIAAQLLPPLYSLVFIFGFVGNMMVFLILISCKKLKSMTDIYLFNLAISDLLFLLTLPFWAHYAANEWVFGNIMCKLFTGIYHIGYFGGIFFIILLTIDRYLAIVHAVFAIKARTVNFGVITSVVTWVVAVFVSLPEIIFMRSQKEGSHYTCSPHFPRIQYRFWKHFQTLKMVILSLILPLLVMVICYSGILNTLFRCRNEKKRHRAVRLIFAIMIVYFLFWTPYNIVLLLTTFQEYFGLNNCSSSNRLDQAMQVTETLGMTHCCLNPVIYAFVGEKFRNYLSVFFRKHIVKRFCKHCSIFQQVNPDRVSSVYTRSTGEQEVSTGL

SEQ ID NO: 330 - RNA, 82 nt, synthetic construct
  misc_feature 1..82: note = Synthetic Polynucleotide
  source 1..82: mol_type = other RNA
gttttagagctagaaatagcaagttaaaataaaggctagtccgttatcaacttgaaaaagtggcaccgagtcggtgcttttt

SEQ ID NO: 331 - RNA, 82 nt, synthetic construct
  misc_feature 1..82: note = Synthetic Polynucleotide
  source 1..82: mol_type = other RNA
gttttagtactctggaaacagaatctactaaaacaaggcaaaatgccgtgtttatctcgtcaacttgttggcgagatttttt

SEQ ID NO: 332 - DNA, 2689 bp, Homo sapiens
  source 1..2689: mol_type = genomic DNA
tttattctctggaacatgaaacattctgttgtgctcatatcatgcaaattatcactagtaggagagcagagagtggaaatgttccaggtataaagacccacaagataaagaagctcagagtcgttagaaacaggagcagatgtacagggtttgcctgactcacactcaaggttgcataagcaagatttcaaaattaatcctattctggagacctcaacccaatgtacaatgttcctgactggaaaagaagaactatatttttctgattttttttttcaaatctttaccattagttgccctgtatctccgccttcactttctgcaggaaactttatttcctacttctgcatgccaagtttctacctctagatctgtttggttcagttgctgagaagcctgacataccaggactgcctgagacaagccacaagctgaacagagaaagtggattgaacaaggacgcatttccccagtacatccacaacatgctgtccacatctcgttctcggtttatcagaaataccaacgagagcggtgaagaagtcaccaccttttttgattatgattacggtgctccctgtcataaatttgacgtgaagcaaattggggcccaactcctgcctccgctctactcgctggtgttcatctttggttttgtgggcaacatgctggtcgtcctcatcttaataaactgcaaaaagctgaagtgcttgactgacatttacctgctcaacctggccatctctgatctgctttttcttattactctcccattgtgggctcactctgctgcaaatgagtgggtctttgggaatgcaatgtgcaaattattcacagggctgtatcacatcggttattttggcggaatcttcttcatcatcctcctgacaatcgatagatacctggctattgtccatgctgtgtttgctttaaaagccaggacggtcacctttggggtggtgacaagtgtgatcacctggttggtggctgtgtttgcttctgtcccaggaatcatctttactaaatgccagaaagaagattctgtttatgtctgtggcccttattttccacgaggatggaataatttccacacaataatgaggaacattttggggctggtcctgccgctgctcatcatggtcatctgctactcgggaatcctgaaaaccctgcttcggtgtcgaaacgagaagaagaggcatagggcagtgagagtcatcttcaccatcatgattgtttactttctcttctggactccctataatattgtcattctcctgaacaccttccaggaattcttcggcctgagtaactgtgaaagcaccagtcaactggaccaagccacgcaggtgacagagactcttgggatgactcactgctgcatcaatcccatcatctatgccttcgttggggagaagttcagaagcctttttcacatagctcttggctgtaggattgccccactccaaaaaccagtgtgtggaggtccaggagtgagaccaggaaagaatgtgaaagtgactacacaaggactcctcgatggtcgtggaaaaggaaagtcaattggcagagcccctgaagccagtcttcaggacaaagaaggagcctagagacagaaatgacagatctctgctttggaaatcacacgtctggcttcacagatgtgtgattcacagtgtgaatcttggtgtctacgttaccaggcaggaaggctgagaggagagagactccagctgggttggaaaacagtattttccaaactaccttccagttcctcatttttgaatacaggcatagagttcagactttttttaaatagtaaaaataaaattaaagctgaaaactgcaacttgtaaatgtggtaaagagttagtttgagttactatcatgtcaaacgtgaaaatgctgtattagtcacagagataattctagctttgagcttaagaattttgagcaggtggtatgtttgggagactgctgagtcaacccaatagttgttgattggcaggagttggaagtgtgtgatctgtgggcacattagcctatgtgcatgcagcatctaagtaatgatgtcgtttgaatcacagtatacgctccatcgctgtcatctcagctggatctccattctctcaggcttgctgccaaaagccttttgtgttttgttttgtatcattatgaagtcatgcgtttaatcacattcgagtgtttcagtgcttcgcagatgtccttgatgctcatattgttccctattttgccagtgggaactcctaaatcaagttggcttctaatcaaagcttttaaaccctattggtaaagaatggaaggtggagaagctccctgaagtaagcaaagactttcctcttagtcgagccaagttaagaatgttcttatgttgcccagtgtgtttctgatctgatgcaagcaagaaacactgggcttctagaaccaggcaacttgggaactagactcccaagctggactatggctctactttcaggccacatggctaaagaaggtttcagaaagaagtggggacagagcagaactttcaccttcatatatttgtatgatcctaatgaatgcataaaatgttaagttgatggtgatgaaatgtaaatactgtttttaacaactatgatttggaaaataaatcaatgctataactatgttgaaaaaaaaaaaaaaaaaa

SEQ ID NO: 333 - DNA, 2335 bp, Homo sapiens
  source 1..2335: mol_type = genomic DNA
tttattctctggaacatgaaacattctgttgtgctcatatcatgcaaattatcactagtaggagagcagagagtggaaatgttccaggtataaagacccacaagataaagaagctcagagtcgttagaaacaggagcagatgtacagggtttgcctgactcacactcaaggttgcataagcaagatttcaaaattaatcctattctggagacctcaacccaatgtacaatgttcctgactggaaaagaagaactatatttttctgattttttttttcaaatctttaccattagttgccctgtatctccgccttcactttctgcaggaaactttatttcctacttctgcatgccaagtttctacctctagatctgtttggttcagttgctgagaagcctgacataccaggactgcctgagacaagccacaagctgaacagagaaagtggattgaacaaggacgcatttccccagtacatccacaacatgctgtccacatctcgttctcggtttatcagaaataccaacgagagcggtgaagaagtcaccaccttttttgattatgattacggtgctccctgtcataaatttgacgtgaagcaaattggggcccaactcctgcctccgctctactcgctggtgttcatctttggttttgtgggcaacatgctggtcgtcctcatcttaataaactgcaaaaagctgaagtgcttgactgacatttacctgctcaacctggccatctctgatctgctttttcttattactctcccattgtgggctcactctgctgcaaatgagtgggtctttgggaatgcaatgtgcaaattattcacagggctgtatcacatcggttattttggcggaatcttcttcatcatcctcctgacaatcgatagatacctggctattgtccatgctgtgtttgctttaaaagccaggacggtcacctttggggtggtgacaagtgtgatcacctggttggtggctgtgtttgcttctgtcccaggaatcatctttactaaatgccagaaagaagattctgtttatgtctgtggcccttattttccacgaggatggaataatttccacacaataatgaggaacattttggggctggtcctgccgctgctcatcatggtcatctgctactcgggaatcctgaaaaccctgcttcggtgtcgaaacgagaagaagaggcatagggcagtgagagtcatcttcaccatcatgattgtttactttctcttctggactccctataatattgtcattctcctgaacaccttccaggaattcttcggcctgagtaactgtgaaagcaccagtcaactggaccaagccacgcaggtgacagagactcttgggatgactcactgctgcatcaatcccatcatctatgccttcgttggggagaagttcagaaggtatctctcggtgttcttccgaaagcacatcaccaagcgcttctgcaaacaatgtccagttttctacagggagacagtggatggagtgacttcaacaaacacgccttccactggggagcaggaagtctcggctggtttataaaacgaggagcagtttgattgttgtttataaagggagataacaatctgtatataacaacaaacttcaagggtttgttgaacaatagaaacctgtaaagcaggtgcccaggaacctcagggctgtgtgtactaatacagactatgtcacccaatgcatatccaacatgtgctcagggaataatccagaaaaactgtgggtagagactttgactctccagaaagctcatctcagctcctgaaaaatgcctcattaccttgtgctaatcctctttttctagtcttcataatttcttcactcaatctctgattctgtcaatgtcttgaaatcaagggccagctggaggtgaagaagagaatgtgacaggcacagatgaatgggagtgagggatagtggggtcagggctgagaggagaaggagggagacatgagcatggctgagcctggacaaagacaaaggtgagcaaagggctcacgcattcagccaggagatgatactggtccttagccccatctgccacgtgtatttaaccttgaagggttcaccaggtcagggagagtttgggaactgcaataacctgggagttttggtggagtccgatgattctcttttgcataagtgcatgacatatttttgctttattacagtttatctatggcacccatgcaccttacatttgaaatctatgaaatatcatgctccattgttcagatgcttcttaggccacatccccctgtctaaaaattcagaaaatttttgtttataaaaga

SEQ ID NO: 334 - protein, 374 aa, Homo sapiens
MLSTSRSRFIRNTNESGEEVTTFFDYDYGAPCHKFDVKQIGAQLLPPLYSLVFIFGFVGNMLVVLILINCKKLKCLTDIYLLNLAISDLLFLITLPLWAHSAANEWVFGNAMCKLFTGLYHIGYFGGIFFIILLTIDRYLAIVHAVFALKARTVTFGVVTSVITWLVAVFASVPGIIFTKCQKEDSVYVCGPYFPRGWNNFHTIMRNILGLVLPLLIMVICYSGILKTLLRCRNEKKRHRAVRVIFTIMIVYFLFWTPYNIVILLNTFQEFFGLSNCESTSQLDQATQVTETLGMTHCCINPIIYAFVGEKFRSLFHIALGCRIAPLQKPVCGGPGVRPGKNVKVTTQGLLDGRGKGKSIGRAPEASLQDKEGA

SEQ ID NO: 335 - protein, 360 aa, Homo sapiens
MLSTSRSRFIRNTNESGEEVTTFFDYDYGAPCHKFDVKQIGAQLLPPLYSLVFIFGFVGNMLVVLILINCKKLKCLTDIYLLNLAISDLLFLITLPLWAHSAANEWVFGNAMCKLFTGLYHIGYFGGIFFIILLTIDRYLAIVHAVFALKARTVTFGVVTSVITWLVAVFASVPGIIFTKCQKEDSVYVCGPYFPRGWNNFHTIMRNILGLVLPLLIMVICYSGILKTLLRCRNEKKRHRAVRVIFTIMIVYFLFWTPYNIVILLNTFQEFFGLSNCESTSQLDQATQVTETLGMTHCCINPIIYAFVGEKFRRYLSVFFRKHITKRFCKQCPVFYRETVDGVTSTNTPSTGEQEVSAGL

SEQ ID NO: 336 - protein, 373 aa, Mus musculus
MEDNNMLPQFIHGILSTSHSLFTRSIQELDEGATTPYDYDDGEPCHKTSVKQIGAWILPPLYSLVFIFGFVGNMLVIIILIGCKKLKSMTDIYLLNLAISDLLFLLTLPFWAHYAANEWVFGNIMCKVFTGLYHIGYFGGIFFIILLTIDRYLAIVHAVFALKARTVTFGVITSVVTWVVAVFASLPGIIFTKSKQDDHHYTCGPYFTQLWKNFQTIMRNILSLILPLLVMVICYSGILHTLFRCRNEKKRHRAVRLIFAIMIVYFLFWTPYNIVLFLTTFQESLGMSNCVIDKHLDQAMQVTETLGMTHCCINPVIYAFVGEKFRRYLSIFFRKHIAKRLCKQCPVFYRETADRVSSTFTPSTGEQEVSVGL

SEQ ID NO: 337 - protein, 373 aa, Rattus norvegicus
MEDSNMLPQFIHGILSTSHSLFPRSIQELDEGATTPYDYDDGEPCHKTSVKQIGAWILPPLYSLVFIFGFVGNMLVIIILISCKKLKSMTDIYLFNLAISDLLFLLTLPFWAHYAANEWVFGNIMCKLFTGLYHIGYFGGIFFIILLTIDRYLAIVHAVFALKARTVTFGVITSVVTWVVAVFASLPGIIFTKSEQEDDQHTCGPYFPTIWKNFQTIMRNILSLILPLLVMVICYSGILHTLFRCRNEKKRHRAVRLIFAIMIVYFLFWTPYNIVLFLTTFQEFLGMSNCVVDMHLDQAMQVTETLGMTHCCVNPIIYAFVGEKFRRYLSIFFRKHIAKNLCKQCPVFYRETADRVSSTFTPSTGEQEVSVGL

SEQ ID NO: 338 - protein, 1367 aa, synthetic construct
  REGION 1..1367: note = Synthetic Polypeptide
DKKYSIGLAIGTNSVGWAVITDEYKVPSKKFKVLGNTDRHSIKKNLIGALLFDSGETAEATRLKRTARRRYTRRKNRICYLQEIFSNEMAKVDDSFFHRLEESFLVEEDKKHERHPIFGNIVDEVAYHEKYPTIYHLRKKLVDSTDKADLRLIYLALAHMIKFRGHFLIEGDLNPDNSDVDKLFIQLVQTYNQLFEENPINASGVDAKAILSARLSKSRRLENLIAQLPGEKKNGLFGNLIALSLGLTPNFKSNFDLAEDAKLQLSKDTYDDDLDNLLAQIGDQYADLFLAAKNLSDAILLSDILRVNTEITKAPLSASMIKRYDEHHQDLTLLKALVRQQLPEKYKEIFFDQSKNGYAGYIDGGASQEEFYKFIKPILEKMDGTEELLVKLNREDLLRKQRTFDNGSIPHQIHLGELHAILRRQEDFYPFLKDNREKIEKILTFRIPYYVGPLARGNSRFAWMTRKSEETITPWNFEEVVDKGASAQSFIERMTAFDKNLPNEKVLPKHSLLYEYFTVYNELTKVKYVTEGMRKPAFLSGEQKKAIVDLLFKTNRKVTVKQLKEDYFKKIECFDSVEISGVEDRFNASLGTYHDLLKIIKDKDFLDNEENEDILEDIVLTLTLFEDREMIEERLKTYAHLFDDKVMKQLKRRRYTGWGALSRKLINGIRDKQSGKTILDFLKSDGFANRNFMALIHDDSLTFKEDIQKAQVSGQGDSLHEHIANLAGSPAIKKGILQTVKVVDELVKVMGRHKPENIVIEMARENQTTQKGQKNSRERMKRIEEGIKELGSQILKEHPVENTQLQNEKLYLYYLQNGRDMYVDQELDINRLSDYDVDHIVPQSFLKDDSIDNKVLTRSDKNRGKSDNVPSEEVVKKMKNYWRQLLNAKLITQRKFDNLTKAERGGLSELDKAGFIKRQLVETRAITKHVAQILDSRMNTKYDENDKLIREVKVITLKSKLVSDFRKDFQFYKVREINNYHHAHDAYLNAVVGTALIKKYPKLESEFVYGDYKVYDVRKMIAKSEQEIGKATAKYFFYSNIMNFFKTEITLANGEIRKRPLIETNGETGEIVWDKGRDFATVRKVLSMPQVNIVKKTEVQTGGFSKESILPKRNSDKLIARKKDWDPKKYGGFDSPTVAYSVLVVAKVEKGKSKKLKSVKELLGITIMERSSFEKNPIDFLEAKGYKEVKKDLIIKLPKYSLFELENGRKRMLASAGELQKGNELALPSKYVNFLYLASHYEKLKGSPEDNEQKQLFVEQHKHYLDEIIEQISEFSKRVILADANLDKVLSAYNKHRDKPIREQAENIIHLFTLTNLGAPAAFKYFDTTIDRKRYTSTKEVLDATLIHQSITGLYETRIDLSQLGGD

SEQ ID NO: 339 - protein, 1612 aa, synthetic construct
  REGION 1..1612: note = Synthetic Polypeptide
MSSETGPVAVDPTLRRRIEPHEFEVFFDPRELRKETCLLYEINWGGRHSIWRHTSQNTNKHVEVNFIEKFTTERYFCPNTRCSITWFLSWSPCGECSRAITEFLSRYPHVTLFIYIARLYHHADPRNRQGLRDLISSGVTIQIMTEQESGYCWRNFVNYSPSNEAHWPRYPHLWVRLYVLELYCIILGLPPCLNILRRKQPQLTFFTIALQSCHYQRLPPHILWATGLKSGSETPGTSESATPESDKKYSIGLAIGTNSVGWAVITDEYKVPSKKFKVLGNTDRHSIKKNLIGALLFDSGETAEATRLKRTARRRYTRRKNRICYLQEIFSNEMAKVDDSFFHRLEESFLVEEDKKHERHPIFGNIVDEVAYHEKYPTIYHLRKKLVDSTDKADLRLIYLALAHMIKFRGHFLIEGDLNPDNSDVDKLFIQLVQTYNQLFEENPINASGVDAKAILSARLSKSRRLENLIAQLPGEKKNGLFGNLIALSLGLTPNFKSNFDLAEDAKLQLSKDTYDDDLDNLLAQIGDQYADLFLAAKNLSDAILLSDILRVNTEITKAPLSASMIKRYDEHHQDLTLLKALVRQQLPEKYKEIFFDQSKNGYAGYIDGGASQEEFYKFIKPILEKMDGTEELLVKLNREDLLRKQRTFDNGSIPHQIHLGELHAILRRQEDFYPFLKDNREKIEKILTFRIPYYVGPLARGNSRFAWMTRKSEETITPWNFEEVVDKGASAQSFIERMTAFDKNLPNEKVLPKHSLLYEYFTVYNELTKVKYVTEGMRKPAFLSGEQKKAIVDLLFKTNRKVTVKQLKEDYFKKIECFDSVEISGVEDRFNASLGTYHDLLKIIKDKDFLDNEENEDILEDIVLTLTLFEDREMIEERLKTYAHLFDDKVMKQLKRRRYTGWGALSRKLINGIRDKQSGKTILDFLKSDGFANRNFMALIHDDSLTFKEDIQKAQVSGQGDSLHEHIANLAGSPAIKKGILQTVKVVDELVKVMGRHKPENIVIEMARENQTTQKGQKNSRERMKRIEEGIKELGSQILKEHPVENTQLQNEKLYLYYLQNGRDMYVDQELDINRLSDYDVDHIVPQSFLKDDSIDNKVLTRSDKNRGKSDNVPSEEVVKKMKNYWRQLLNAKLITQRKFDNLTKAERGGLSELDKAGFIKRQLVETRAITKHVAQILDSRMNTKYDENDKLIREVKVITLKSKLVSDFRKDFQFYKVREINNYHHAHDAYLNAVVGTALIKKYPKLESEFVYGDYKVYDVRKMIAKSEQEIGKATAKYFFYSNIMNFFKTEITLANGEIRKRPLIETNGETGEIVWDKGRDFATVRKVLSMPQVNIVKKTEVQTGGFSKESILPKRNSDKLIARKKDWDPKKYGGFDSPTVAYSVLVVAKVEKGKSKKLKSVKELLGITIMERSSFEKNPIDFLEAKGYKEVKKDLIIKLPKYSLFELENGRKRMLASAGELQKGNELALPSKYVNFLYLASHYEKLKGSPEDNEQKQLFVEQHKHYLDEIIEQISEFSKRVILADANLDKVLSAYNKHRDKPIREQAENIIHLFTLTNLGAPAAFKYFDTTIDRKRYTSTKEVLDATLIHQSITGLYETRIDLSQLGGD

SEQ ID NO: 340 - protein, 1300 aa, Staphylococcus aureus
MSIYQEFVNKYSLSKTLRFELIPQGKTLENIKARGLILDDEKRAKDYKKAKQIIDKYHQFFIEEILSSVCISEDLLQNYSDVYFKLKKSDDDNLQKDFKSAKDTIKKQISEYIKDSEKFKNLFNQNLIDAKKGQESDLILWLKQSKDNGIELFKANSDITDIDEALEIIKSFKGWTTYFKGFHENRKNVYSSNDIPTSIIYRIVDDNLPKFLENKAKYESLKDKAPEAINYEQIKKDLAEELTFDIDYKTSEVNQRVFSLDEVFEIANFNNYLNQSGITKFNTIIGGKFVNGENTKRKGINEYINLYSQQINDKTLKKYKMSVLFKQILSDTESKSFVIDKLEDDSDVVTTMQSFYEQIAAFKTVEEKSIKETLSLLFDDLKAQKLDLSKIYFKNDKSLTDLSQQVFDDYSVIGTAVLEYITQQIAPKNLDNPSKKEQELIAKKTEKAKYLSLETIKLALEEFNKHRDIDKQCRFEEILANFAAIPMIFDEIAQNKDNLAQISIKYQNQGKKDLLQASAEDDVKAIKDLLDQTNNLLHKLKIFHISQSEDKANILDKDEHFYLVFEECYFELANIVPLYNKIRNYITQKPYSDEKFKLNFENSTLANGWDKNKEPDNTAILFIKDDKYYLGVMNKKNNKIFDDKAIKENKGEGYKKIVYKLLPGANKMLPKVFFSAKSIKFYNPSEDILRIRNHSTHTKNGSPQKGYEKFEFNIEDCRKFIDFYKQSISKHPEWKDFGFRFSDTQRYNSIDEFYREVENQGYKLTFENISESYIDSVVNQGKLYLFQIYNKDFSAYSKGRPNLHTLYWKALFDERNLQDVVYKLNGEAELFYRKQSIPKKITHPAKEAIANKNKDNPKKESVFEYDLIKDKRFTEDKFFFHCPITINFKSSGANKFNDEINLLLKEKANDVHILSIDRGERHLAYYTLVDGKGNIIKQDTFNIIGNDRMKTNYHDKLAAIEKDRDSARKDWKKINNIKEMKEGYLSQVVHEIAKLVIEYNAIVVFEDLNFGFKRGRFKVEKQVYQKLEKMLIEKLNYLVFKDNEFDKTGGVLRAYQLTAPFETFKKMGKQTGIIYYVPAGFTSKICPVTGFVNQLYPKYESVSKSQEFFSKFDKICYNLDKGYFEFSFDYKNFGDKAAKGKWTIASFGSRLINFRNSDKNHNWDTREVYPTKELEKLLKDYSIEYGHGECIKAAICGESDKKFFAKLTSVLNTILQMRNSKTGTELDYLISPVADVNGNFFDSRQAPKNMPQDADANGAYHIGLKGLMLLGRIKNNQEGKKLNLVIKNEEYFEFVQNRNN

SEQ ID NO: 341 - protein, 1300 aa, Staphylococcus aureus
MSIYQEFVNKYSLSKTLRFELIPQGKTLENIKARGLILDDEKRAKDYKKAKQIIDKYHQFFIEEILSSVCISEDLLQNYSDVYFKLKKSDDDNLQKDFKSAKDTIKKQISEYIKDSEKFKNLFNQNLIDAKKGQESDLILWLKQSKDNGIELFKANSDITDIDEALEIIKSFKGWTTYFKGFHENRKNVYSSNDIPTSIIYRIVDDNLPKFLENKAKYESLKDKAPEAINYEQIKKDLAEELTFDIDYKTSEVNQRVFSLDEVFEIANFNNYLNQSGITKFNTIIGGKFVNGENTKRKGINEYINLYSQQINDKTLKKYKMSVLFKQILSDTESKSFVIDKLEDDSDVVTTMQSFYEQIAAFKTVEEKSIKETLSLLFDDLKAQKLDLSKIYFKNDKSLTDLSQQVFDDYSVIGTAVLEYITQQIAPKNLDNPSKKEQELIAKKTEKAKYLSLETIKLALEEFNKHRDIDKQCRFEEILANFAAIPMIFDEIAQNKDNLAQISIKYQNQGKKDLLQASAEDDVKAIKDLLDQTNNLLHKLKIFHISQSEDKANILDKDEHFYLVFEECYFELANIVPLYNKIRNYITQKPYSDEKFKLNFENSTLANGWDKNKEPDNTAILFIKDDKYYLGVMNKKNNKIFDDKAIKENKGEGYKKIVYKLLPGANKMLPKVFFSAKSIKFYNPSEDILRIRNHSTHTKNGSPQKGYEKFEFNIEDCRKFIDFYKQSISKHPEWKDFGFRFSDTQRYNSIDEFYREVENQGYKLTFENISESYIDSVVNQGKLYLFQIYNKDFSAYSKGRPNLHTLYWKALFDERNLQDVVYKLNGEAELFYRKQSIPKKITHPAKEAIANKNKDNPKKESVFEYDLIKDKRFTEDKFFFHCPITINFKSSGANKFNDEINLLLKEKANDVHILSIARGERHLAYYTLVDGKGNIIKQDTFNIIGNDRMKTNYHDKLAAIEKDRDSARKDWKKINNIKEMKEGYLSQVVHEIAKLVIEYNAIVVFEDLNFGFKRGRFKVEKQVYQKLEKMLIEKLNYLVFKDNEFDKTGGVLRAYQLTAPFETFKKMGKQTGIIYYVPAGFTSKICPVTGFVNQLYPKYESVSKSQEFFSKFDKICYNLDKGYFEFSFDYKNFGDKAAKGKWTIASFGSRLINFRNSDKNHNWDTREVYPTKELEKLLKDYSIEYGHGECIKAAICGESDKKFFAKLTSVLNTILQMRNSKTGTELDYLISPVADVNGNFFDSRQAPKNMPQDADANGAYHIGLKGLMLLGRIKNNQEGKKLNLVIKNEEYFEFVQNRNN

SEQ ID NO: 342 - protein, 1300 aa, Staphylococcus aureus
MSIYQEFVNKYSLSKTLRFELIPQGKTLENIKARGLILDDEKRAKDYKKAKQIIDKYHQFFIEEILSSVCISEDLLQNYSDVYFKLKKSDDDNLQKDFKSAKDTIKKQISEYIKDSEKFKNLFNQNLIDAKKGQESDLILWLKQSKDNGIELFKANSDITDIDEALEIIKSFKGWTTYFKGFHENRKNVYSSNDIPTSIIYRIVDDNLPKFLENKAKYESLKDKAPEAINYEQIKKDLAEELTFDIDYKTSEVNQRVFSLDEVFEIANFNNYLNQSGITKFNTIIGGKFVNGENTKRKGINEYINLYSQQINDKTLKKYKMSVLFKQILSDTESKSFVIDKLEDDSDVVTTMQSFYEQIAAFKTVEEKSIKETLSLLFDDLKAQKLDLSKIYFKNDKSLTDLSQQVFDDYSVIGTAVLEYITQQIAPKNLDNPSKKEQELIAKKTEKAKYLSLETIKLALEEFNKHRDIDKQCRFEEILANFAAIPMIFDEIAQNKDNLAQISIKYQNQGKKDLLQASAEDDVKAIKDLLDQTNNLLHKLKIFHISQSEDKANILDKDEHFYLVFEECYFELANIVPLYNKIRNYITQKPYSDEKFKLNFENSTLANGWDKNKEPDNTAILFIKDDKYYLGVMNKKNNKIFDDKAIKENKGEGYKKIVYKLLPGANKMLPKVFFSAKSIKFYNPSEDILRIRNHSTHTKNGSPQKGYEKFEFNIEDCRKFIDFYKQSISKHPEWKDFGFRFSDTQRYNSIDEFYREVENQGYKLTFENISESYIDSVVNQGKLYLFQIYNKDFSAYSKGRPNLHTLYWKALFDERNLQDVVYKLNGEAELFYRKQSIPKKITHPAKEAIANKNKDNPKKESVFEYDLIKDKRFTEDKFFFHCPITINFKSSGANKFNDEINLLLKEKANDVHILSIDRGERHLAYYTLVDGKGNIIKQDTFNIIGNDRMKTNYHDKLAAIEKDRDSARKDWKKINNIKEMKEGYLSQVVHEIAKLVIEYNAIVVFADLNFGFKRGRFKVEKQVYQKLEKMLIEKLNYLVFKDNEFDKTGGVLRAYQLTAPFETFKKMGKQTGIIYYVPAGFTSKICPVTGFVNQLYPKYESVSKSQEFFSKFDKICYNLDKGYFEFSFDYKNFGDKAAKGKWTIASFGSRLINFRNSDKNHNWDTREVYPTKELEKLLKDYSIEYGHGECIKAAICGESDKKFFAKLTSVLNTILQMRNSKTGTELDYLISPVADVNGNFFDSRQAPKNMPQDADANGAYHIGLKGLMLLGRIKNNQEGKKLNLVIKNEEYFEFVQNRNN

SEQ ID NO: 343 - protein, 1300 aa, Staphylococcus aureus
MSIYQEFVNKYSLSKTLRFELIPQGKTLENIKARGLILDDEKRAKDYKKAKQIIDKYHQFFIEEILSSVCISEDLLQNYSDVYFKLKKSDDDNLQKDFKSAKDTIKKQISEYIKDSEKFKNLFNQNLIDAKKGQESDLILWLKQSKDNGIELFKANSDITDIDEALEIIKSFKGWTTYFKGFHENRKNVYSSNDIPTSIIYRIVDDNLPKFLENKAKYESLKDKAPEAINYEQIKKDLAEELTFDIDYKTSEVNQRVFSLDEVFEIANFNNYLNQSGITKFNTIIGGKFVNGENTKRKGINEYINLYSQQINDKTLKKYKMSVLFKQILSDTESKSFVIDKLEDDSDVVTTMQSFYEQIAAFKTVEEKSIKETLSLLFDDLKAQKLDLSKIYFKNDKSLTDLSQQVFDDYSVIGTAVLEYITQQIAPKNLDNPSKKEQELIAKKTEKAKYLSLETIKLALEEFNKHRDIDKQCRFEEILANFAAIPMIFDEIAQNKDNLAQISIKYQNQGKKDLLQASAEDDVKAIKDLLDQTNNLLHKLKIFHISQSEDKANILDKDEHFYLVFEECYFELANIVPLYNKIRNYITQKPYSDEKFKLNFENSTLANGWDKNKEPDNTAILFIKDDKYYLGVMNKKNNKIFDDKAIKENKGEGYKKIVYKLLPGANKMLPKVFFSAKSIKFYNPSEDILRIRNHSTHTKNGSPQKGYEKFEFNIEDCRKFIDFYKQSISKHPEWKDFGFRFSDTQRYNSIDEFYREVENQGYKLTFENISESYIDSVVNQGKLYLFQIYNKDFSAYSKGRPNLHTLYWKALFDERNLQDVVYKLNGEAELFYRKQSIPKKITHPAKEAIANKNKDNPKKESVFEYDLIKDKRFTEDKFFFHCPITINFKSSGANKFNDEINLLLKEKANDVHILSIDRGERHLAYYTLVDGKGNIIKQDTFNIIGNDRMKTNYHDKLAAIEKDRDSARKDWKKINNIKEMKEGYLSQVVHEIAKLVIEYNAIVVFEDLNFGFKRGRFKVEKQVYQKLEKMLIEKLNYLVFKDNEFDKTGGVLRAYQLTAPFETFKKMGKQTGIIYYVPAGFTSKICPVTGFVNQLYPKYESVSKSQEFFSKFDKICYNLDKGYFEFSFDYKNFGDKAAKGKWTIASFGSRLINFRNSDKNHNWDTREVYPTKELEKLLKDYSIEYGHGECIKAAICGESDKKFFAKLTSVLNTILQMRNSKTGTELDYLISPVADVNGNFFDSRQAPKNMPQDAAANGAYHIGLKGLMLLGRIKNNQEGKKLNLVIKNEEYFEFVQNRNN

SEQ ID NO: 344 - protein, 1300 aa, Staphylococcus aureus
MSIYQEFVNKYSLSKTLRFELIPQGKTLENIKARGLILDDEKRAKDYKKAKQIIDKYHQFFIEEILSSVCISEDLLQNYSDVYFKLKKSDDDNLQKDFKSAKDTIKKQISEYIKDSEKFKNLFNQNLIDAKKGQESDLILWLKQSKDNGIELFKANSDITDIDEALEIIKSFKGWTTYFKGFHENRKNVYSSNDIPTSIIYRIVDDNLPKFLENKAKYESLKDKAPEAINYEQIKKDLAEELTFDIDYKTSEVNQRVFSLDEVFEIANFNNYLNQSGITKFNTIIGGKFVNGENTKRKGINEYINLYSQQINDKTLKKYKMSVLFKQILSDTESKSFVIDKLEDDSDVVTTMQSFYEQIAAFKTVEEKSIKETLSLLFDDLKAQKLDLSKIYFKNDKSLTDLSQQVFDDYSVIGTAVLEYITQQIAPKNLDNPSKKEQELIAKKTEKAKYLSLETIKLALEEFNKHRDIDKQCRFEEILANFAAIPMIFDEIAQNKDNLAQISIKYQNQGKKDLLQASAEDDVKAIKDLLDQTNNLLHKLKIFHISQSEDKANILDKDEHFYLVFEECYFELANIVPLYNKIRNYITQKPYSDEKFKLNFENSTLANGWDKNKEPDNTAILFIKDDKYYLGVMNKKNNKIFDDKAIKENKGEGYKKIVYKLLPGANKMLPKVFFSAKSIKFYNPSEDILRIRNHSTHTKNGSPQKGYEKFEFNIEDCRKFIDFYKQSISKHPEWKDFGFRFSDTQRYNSIDEFYREVENQGYKLTFENISESYIDSVVNQGKLYLFQIYNKDFSAYSKGRPNLHTLYWKALFDERNLQDVVYKLNGEAELFYRKQSIPKKITHPAKEAIANKNKDNPKKESVFEYDLIKDKRFTEDKFFFHCPITINFKSSGANKFNDEINLLLKEKANDVHILSIARGERHLAYYTLVDGKGNIIKQDTFNIIGNDRMKTNYHDKLAAIEKDRDSARKDWKKINNIKEMKEGYLSQVVHEIAKLVIEYNAIVVFADLNFGFKRGRFKVEKQVYQKLEKMLIEKLNYLVFKDNEFDKTGGVLRAYQLTAPFETFKKMGKQTGIIYYVPAGFTSKICPVTGFVNQLYPKYESVSKSQEFFSKFDKICYNLDKGYFEFSFDYKNFGDKAAKGKWTIASFGSRLINFRNSDKNHNWDTREVYPTKELEKLLKDYSIEYGHGECIKAAICGESDKKFFAKLTSVLNTILQMRNSKTGTELDYLISPVADVNGNFFDSRQAPKNMPQDADANGAYHIGLKGLMLLGRIKNNQEGKKLNLVIKNEEYFEFVQNRNN

SEQ ID NO: 345 - protein, 1300 aa, Staphylococcus aureus
MSIYQEFVNKYSLSKTLRFELIPQGKTLENIKARGLILDDEKRAKDYKKAKQIIDKYHQFFIEEILSSVCISEDLLQNYSDVYFKLKKSDDDNLQKDFKSAKDTIKKQISEYIKDSEKFKNLFNQNLIDAKKGQESDLILWLKQSKDNGIELFKANSDITDIDEALEIIKSFKGWTTYFKGFHENRKNVYSSNDIPTSIIYRIVDDNLPKFLENKAKYESLKDKAPEAINYEQIKKDLAEELTFDIDYKTSEVNQRVFSLDEVFEIANFNNYLNQSGITKFNTIIGGKFVNGENTKRKGINEYINLYSQQINDKTLKKYKMSVLFKQILSDTESKSFVIDKLEDDSDVVTTMQSFYEQIAAFKTVEEKSIKETLSLLFDDLKAQKLDLSKIYFKNDKSLTDLSQQVFDDYSVIGTAVLEYITQQIAPKNLDNPSKKEQELIAKKTEKAKYLSLETIKLALEEFNKHRDIDKQCRFEEILANFAAIPMIFDEIAQNKDNLAQISIKYQNQGKKDLLQASAEDDVKAIKDLLDQTNNLLHKLKIFHISQSEDKANILDKDEHFYLVFEECYFELANIVPLYNKIRNYITQKPYSDEKFKLNFENSTLANGWDKNKEPDNTAILFIKDDKYYLGVMNKKNNKIFDDKAIKENKGEGYKKIVYKLLPGANKMLPKVFFSAKSIKFYNPSEDILRIRNHSTHTKNGSPQKGYEKFEFNIEDCRKFIDFYKQSISKHPEWKDFGFRFSDTQRYNSIDEFYREVENQGYKLTFENISESYIDSVVNQGKLYLFQIYNKDFSAYSKGRPNLHTLYWKALFDERNLQDVVYKLNGEAELFYRKQSIPKKITHPAKEAIANKNKDNPKKESVFEYDLIKDKRFTEDKFFFHCPITINFKSSGANKFNDEINLLLKEKANDVHILSIARGERHLAYYTLVDGKGNIIKQDTFNIIGNDRMKTNYHDKLAAIEKDRDSARKDWKKINNIKEMKEGYLSQVVHEIAKLVIEYNAIVVFEDLNFGFKRGRFKVEKQVYQKLEKMLIEKLNYLVFKDNEFDKTGGVLRAYQLTAPFETFKKMGKQTGIIYYVPAGFTSKICPVTGFVNQLYPKYESVSKSQEFFSKFDKICYNLDKGYFEFSFDYKNFGDKAAKGKWTIASFGSRLINFRNSDKNHNWDTREVYPTKELEKLLKDYSIEYGHGECIKAAICGESDKKFFAKLTSVLNTILQMRNSKTGTELDYLISPVADVNGNFFDSRQAPKNMPQDAAANGAYHIGLKGLMLLGRIKNNQEGKKLNLVIKNEEYFEFVQNRNN

SEQ ID NO: 346 - protein, 1300 aa, Staphylococcus aureus
MSIYQEFVNKYSLSKTLRFELIPQGKTLENIKARGLILDDEKRAKDYKKAKQIIDKYHQFFIEEILSSVCISEDLLQNYSDVYFKLKKSDDDNLQKDFKSAKDTIKKQISEYIKDSEKFKNLFNQNLIDAKKGQESDLILWLKQSKDNGIELFKANSDITDIDEALEIIKSFKGWTTYFKGFHENRKNVYSSNDIPTSIIYRIVDDNLPKFLENKAKYESLKDKAPEAINYEQIKKDLAEELTFDIDYKTSEVNQRVFSLDEVFEIANFNNYLNQSGITKFNTIIGGKFVNGENTKRKGINEYINLYSQQINDKTLKKYKMSVLFKQILSDTESKSFVIDKLEDDSDVVTTMQSFYEQIAAFKTVEEKSIKETLSLLFDDLKAQKLDLSKIYFKNDKSLTDLSQQVFDDYSVIGTAVLEYITQQIAPKNLDNPSKKEQELIAKKTEKAKYLSLETIKLALEEFNKHRDIDKQCRFEEILANFAAIPMIFDEIAQNKDNLAQISIKYQNQGKKDLLQASAEDDVKAIKDLLDQTNNLLHKLKIFHISQSEDKANILDKDEHFYLVFEECYFELANIVPLYNKIRNYITQKPYSDEKFKLNFENSTLANGWDKNKEPDNTAILFIKDDKYYLGVMNKKNNKIFDDKAIKENKGEGYKKIVYKLLPGANKMLPKVFFSAKSIKFYNPSEDILRIRNHSTHTKNGSPQKGYEKFEFNIEDCRKFIDFYKQSISKHPEWKDFGFRFSDTQRYNSIDEFYREVENQGYKLTFENISESYIDSVVNQGKLYLFQIYNKDFSAYSKGRPNLHTLYWKALFDERNLQDVVYKLNGEAELFYRKQSIPKKITHPAKEAIANKNKDNPKKESVFEYDLIKDKRFTEDKFFFHCPITINFKSSGANKFNDEINLLLKEKANDVHILSIDRGERHLAYYTLVDGKGNIIKQDTFNIIGNDRMKTNYHDKLAAIEKDRDSARKDWKKINNIKEMKEGYLSQVVHEIAKLVIEYNAIVVFADLNFGFKRGRFKVEKQVYQKLEKMLIEKLNYLVFKDNEFDKTGGVLRAYQLTAPFETFKKMGKQTGIIYYVPAGFTSKICPVTGFVNQLYPKYESVSKSQEFFSKFDKICYNLDKGYFEFSFDYKNFGDKAAKGKWTIASFGSRLINFRNSDKNHNWDTREVYPTKELEKLLKDYSIEYGHGECIKAAICGESDKKFFAKLTSVLNTILQMRNSKTGTELDYLISPVADVNGNFFDSRQAPKNMPQDAAANGAYHIGLKGLMLLGRIKNNQEGKKLNLVIKNEEYFEFVQNRNN

SEQ ID NO: 347 - protein, 1300 aa, Staphylococcus aureus
MSIYQEFVNKYSLSKTLRFELIPQGKTLENIKARGLILDDEKRAKDYKKAKQIIDKYHQFFIEEILSSVCISEDLLQNYSDVYFKLKKSDDDNLQKDFKSAKDTIKKQISEYIKDSEKFKNLFNQNLIDAKKGQESDLILWLKQSKDNGIELFKANSDITDIDEALEIIKSFKGWTTYFKGFHENRKNVYSSNDIPTSIIYRIVDDNLPKFLENKAKYESLKDKAPEAINYEQIKKDLAEELTFDIDYKTSEVNQRVFSLDEVFEIANFNNYLNQSGITKFNTIIGGKFVNGENTKRKGINEYINLYSQQINDKTLKKYKMSVLFKQILSDTESKSFVIDKLEDDSDVVTTMQSFYEQIAAFKTVEEKSIKETLSLLFDDLKAQKLDLSKIYFKNDKSLTDLSQQVFDDYSVIGTAVLEYITQQIAPKNLDNPSKKEQELIAKKTEKAKYLSLETIKLALEEFNKHRDIDKQCRFEEILANFAAIPMIFDEIAQNKDNLAQISIKYQNQGKKDLLQASAEDDVKAIKDLLDQTNNLLHKLKIFHISQSEDKANILDKDEHFYLVFEECYFELANIVPLYNKIRNYITQKPYSDEKFKLNFENSTLANGWDKNKEPDNTAILFIKDDKYYLGVMNKKNNKIFDDKAIKENKGEGYKKIVYKLLPGANKMLPKVFFSAKSIKFYNPSEDILRIRNHSTHTKNGSPQKGYEKFEFNIEDCRKFIDFYKQSISKHPEWKDFGFRFSDTQRYNSIDEFYREVENQGYKLTFENISESYIDSVVNQGKLYLFQIYNKDFSAYSKGRPNLHTLYWKALFDERNLQDVVYKLNGEAELFYRKQSIPKKITHPAKEAIANKNKDNPKKESVFEYDLIKDKRFTEDKFFFHCPITINFKSSGANKFNDEINLLLKEKANDVHILSIARGERHLAYYTLVDGKGNIIKQDTFNIIGNDRMKTNYHDKLAAIEKDRDSARKDWKKINNIKEMKEGYLSQVVHEIAKLVIEYNAIVVFADLNFGFKRGRFKVEKQVYQKLEKMLIEKLNYLVFKDNEFDKTGGVLRAYQLTAPFETFKKMGKQTGIIYYVPAGFTSKICPVTGFVNQLYPKYESVSKSQEFFSKFDKICYNLDKGYFEFSFDYKNFGDKAAKGKWTIASFGSRLINFRNSDKNHNWDTREVYPTKELEKLLKDYSIEYGHGECIKAAICGESDKKFFAKLTSVLNTILQMRNSKTGTELDYLISPVADVNGNFFDSRQAPKNMPQDAAANGAYHIGLKGLMLLGRIKNNQEGKKLNLVIKNEEYFEFVQNRNN

SEQ ID NO: 348 - protein, 887 aa, Natronobacterium gregoryi
MTVIDLDSTTTADELTSGHTYDISVTLTGVYDNTDEQHPRMSLAFEQDNGERRYITLWKNTTPKDVFTYDYATGSTYIFTNIDYEVKDGYENLTATYQTTVENATAQEVGTTDEDETFAGGEPLDHHLDDALNETPDDAETESDSGHVMTSFASRDQLPEWTLHTYTLTATDGAKTDTEYARRTLAYTVRQELYTDHDAAPVATDGLMLLTPEPLGETPLDLDCGVRVEADETRTLDYTTAKDRLLARELVEEGLKRSLWDDYLVRGIDEVLSKEPVLTCDEFDLHERYDLSVEVGHSGRAYLHINFRHRFVPKLTLADIDDDNIYPGLRVKTTYRPRRGHIVWGLRDECATDSLNTLGNQSVVAYHRNNQTPINTDLLDAIEAADRRVVETRRQGHGDDAVSFPQELLAVEPNTHQIKQFASDGFHQQARSKTRLSASRCSEKAQAFAERLDPVRLNGSTVEFSSEFFTGNNEQQLRLLYENGESVLTFRDGARGAHPDETFSKGIVNPPESFEVAVVLPEQQADTCKAQWDTMADLLNQAGAPPTRSETVQYDAFSSPESISLNVAGAIDPSEVDAAFVVLPPDQEGFADLASPTETYDELKKALANMGIYSQMAYFDRFRDAKIFYTRNVALGLLAAAGGVAFTTEHAMPGDADMFIGIDVSRSYPEDGASGQINIAATATAVYKDGTILGHSSTRPQLGEKLQSTDVRDIMKNAILGYQQVTGESPTHIVIHRDGFMNEDLDPATEFLNEQGVEYDIVEIRKQPQTRLLAVSDVQYDTPVKSIAAINQNEPRATVATFGAPEYLATRDGGGLPRPIQIERVAGETDIETLTRQVYLLSQSHIQVHNSTARLPITTAYADQASTHATKGYLVQTGAFESNVGFL

SEQ ID NO: 349 - protein, 4 aa, synthetic construct
  REGION 1..4: note = Synthetic Polypeptide
ALAL

SEQ ID NO: 350 - protein, 15 aa, synthetic construct
  REGION 1..15: note = Synthetic Polypeptide
VPFLLEPDNINGKTC

SEQ ID NO: 351 - protein, 12 aa, synthetic construct
  REGION 1..12: note = Synthetic Polypeptide
GSAGSAAGSGEF

SEQ ID NO: 352 - protein, 12 aa, synthetic construct
  REGION 1..12: note = Synthetic Polypeptide
SIVAQLSRPDPA

SEQ ID NO: 353 - protein, 10 aa, synthetic construct
  REGION 1..10: note = Synthetic Polypeptide
MKIIEQLPSA

SEQ ID NO: 354 - protein, 10 aa, synthetic construct
  REGION 1..10: note = Synthetic Polypeptide
VRHKLKRVGS

SEQ ID NO: 355 - protein, 12 aa, synthetic construct
  REGION 1..12: note = Synthetic Polypeptide
GHGTGSTGSGSS

SEQ ID NO: 356 - protein, 7 aa, synthetic construct
  REGION 1..7: note = Synthetic Polypeptide
MSRPDPA

SEQ ID NO: 357 - protein, 12 aa, synthetic construct
  REGION 1..12: note = Synthetic Polypeptide
GSAGSAAGSGEF

SEQ ID NO: 358 - protein, 12 aa, synthetic construct
  REGION 1..12: note = Synthetic Polypeptide
SGSETPGTSESA

SEQ ID NO: 359 - protein, 21 aa, synthetic construct
  REGION 1..21: note = Synthetic Polypeptide
SGSETPGTSESATPEGGSGGS

SEQ ID NO: 360 - protein, 4 aa, synthetic construct
  REGION 1..4: note = Synthetic Polypeptide
GGSM

SEQ ID NO: 361 - protein, 84 aa, Staphylococcus aureus
MTNLSDIIEKETGKQLVIQESILMLPEEVEEVIGNKPESDILVHTAYDESTDENVMLLTSDAPEYKPWALVIQDSNGENKIKML

SEQ ID NO: 362 - protein, 181 aa, Erwinia tasmaniensis
MASRGVNKVILVGNLGQDPEVRYMPNGGAVANITLATSESWRDKQTGETKEKTEWHRVVLFGKLAEVAGEYLRKGSQVYIEGALQTRKWTDQAGVEKYTTEVVVNVGGTMQMLGGRSQGGGASAGGQNGGSNNGWGQPQQPQGGNQFSGGAQQQARPQQQPQQNNAPANNEPPIDFDDDIP

SEQ ID NO: 363 - protein, 209 aa, synthetic construct
  REGION 1..209: note = Synthetic Polypeptide
MAGAQDFVPHTADLAELAAAAGECRGCGLYRDATQAVFGAGGRSARIMMIGEQPGDKEDLAGLPFVGPAGRLLDRALEAADIDRDALYVTNAVKHFKFTRAAGGKRRIHKTPSRTEVVACRPWLIAEMTSVEPDVVVLLGATAAKALLGNDFRVTQHRGEVLHVDDVPGDPALVATVHPSSLLRGPKEERESAFAGLVDDLRVAADVRP

SEQ ID NO: 364 - protein, 313 aa, synthetic construct
  REGION 1..313: note = Synthetic Polypeptide
MIGQKTLYSFFSPSPARKRHAPSPEPAVQGTGVAGVPEESGDAAAIPAKKAPAGQEEPGTPPSSPLSAEQLDRIQRNKAAALLRLAARNVPVGFGESWKKHLSGEFGKPYFIKLMGFVAEERKHYTVYPPPHQVFTWTQMCDIKDVKVVILGQEPYHGPNQAHGLCFSVQRPVPPPPSLENIYKELSTDIEDFVHPGHGDLSGWAKQGVLLLNAVLTVRAHQANSHKERGWEQFTDAVVSWLNQNSNGLVFLLWGSYAQKKGSAIDRKRHHVLQTAHPSPLSVYRGFFGCRHFSKTNELLQKSGKKPIDWKEL

SEQ ID NO: 365 - protein, 7 aa, synthetic construct
  REGION 1..7: note = Synthetic Polypeptide
PKKKRKV

SEQ ID NO: 366 - protein, 30 aa, synthetic construct
  REGION 1..30: note = Synthetic Polypeptide
MDSLLMNRRKFLYQFKNVRWAKGRRETYLC

SEQ ID NO: 367 - RNA, 74 nt, Staphylococcus aureus
  source 1..74: mol_type = genomic RNA
aagaaatttaaaaagggactaaaataaagagtttgcgggactctgcggggttacaatcccctaaaaccgctttt

SEQ ID NO: 368 - RNA, 95 nt, Staphylococcus aureus
  source 1..95: mol_type = genomic RNA
atctaaaattataaatgtaccaaataattaatgctctgtaatcatttaaaagtattttgaacggacctctgtttgacacgtctgaataactaaaa

SEQ ID NO: 369 - RNA, 109 nt, Staphylococcus aureus
  source 1..109: mol_type = genomic RNA
tgtaagggacgccttacacagttacttaaatcttgcagaagctacaaagataaggcttcatgccgaaatcaacaccctgtcattttatggcagggtgttttcgttattt

SEQ ID NO: 370 - RNA, 110 nt, Staphylococcus aureus
  source 1..110: mol_type = genomic RNA
tgtatttcgaaatacagatgtacagttaagaatacataagaatgatacatcactaaaaaaaggctttatgccgtaactactacttattttcaaaataagtagtttttttt

SEQ ID NO: 371 - RNA, 92 nt, Staphylococcus aureus
  source 1..92: mol_type = genomic RNA
attgttagtattcaaaataacatagcaagttaaaataaggctttgtccgttatcaacttttaattaagtagcgctgtttcggcgcttttttt

SEQ ID NO: 372 - RNA, 89 nt, Staphylococcus aureus
  source 1..89: mol_type = genomic RNA
gttggaaccattcaaaacagcatagcaagttaaaataaggctagtccgttatcaacttgaaaaagtggcaccgagtcggtgcttttttt

SEQ ID NO: 373 - RNA, 107 nt, Staphylococcus aureus
  source 1..107: mol_type = genomic RNA
gttggaatcattcgaaacaacacagcaagttaaaataaggcagtgatttttaatccagtccgtacacaacttgaaaaagtgcgcaccgattcggtgcttttttattt

SEQ ID NO: 374 - RNA, 96 nt, Staphylococcus aureus
  source 1..96: mol_type = genomic RNA
ttgtggtttgaaaccattcgaaacaacacagcgagttaaaataaggcttagtccgtactcaacttgaaaaggtggcaccgattcggtgtttttttt

SEQ ID NO: 375 - RNA, 102 nt, Staphylococcus aureus
  source 1..102: mol_type = genomic RNA
acatattgtcgcactgcgaaatgagaaccgttgctacaataaggccgtctgaaaagatgtgccgcaacgctctgccccttaaagcttctgctttaaggggca

SEQ ID NO: 376 - RNA, 110 nt, Staphylococcus aureus
  source 1..110: mol_type = genomic RNA
gcatattgttgcactgcgaaatgagagacgttgctacaataaggcttctgaaaagaatgaccgtaacgctctgccccttgtgattcttaattgcaaggggcatcgttttt

SEQ ID NO: 377 - RNA, 93 nt, Staphylococcus aureus
  source 1..93: mol_type = genomic RNA
gtttaagagctatgctggaaagccacggtgaaaaagttcaactattgcctgatcggaataaatttgaacgatacgacagtcggtgcttttttt

SEQ ID NO: 378 - RNA, 82 nt, Staphylococcus aureus
  source 1..82: mol_type = genomic RNA
gtttaagagctagaaatagcaagtttaaataaggctagtccgttatcaacttgaaaaagtggcaccgagtcggtgctttttt

SEQ ID NO: 379 - RNA, 97 nt, Staphylococcus aureus
  source 1..97: mol_type = genomic RNA
gtttttgtactctcaagattcaataatcttgcagaagctacaaagataaggcttcatgccgaaatcaacaccctgtcattttatggcagggtgtttt

SEQ ID NO: 380 - RNA, 97 nt, Staphylococcus aureus
  source 1..97: mol_type = genomic RNA
gttttagagctgtgttgtttgttaaaacaacacagcgagttaaaataaggcttagtccgtactcaacttgaaaaggtggcaccgattcggtgttttt

SEQ ID NO: 381 - RNA, 20 nt, synthetic construct
  misc_feature 1..20: note = Synthetic Polynucleotide
  source 1..20: mol_type = other RNA
taatccatcttgttccaccc

SEQ ID NO: 382 - RNA, 21 nt, synthetic construct
  misc_feature 1..21: note = Synthetic Polynucleotide
  source 1..21: mol_type = other RNA
ccatcttgttccaccctgtgc

SEQ ID NO: 383 - RNA, 20 nt, synthetic construct
  misc_feature 1..20: note = Synthetic Polynucleotide
  source 1..20: mol_type = other RNA
cagggctccgatgtataata

SEQ ID NO: 384 - RNA, 20 nt, synthetic construct
  misc_feature 1..20: note = Synthetic Polynucleotide
  source 1..20: mol_type = other RNA
ttggcagggctccgatgtat

SEQ ID NO: 385 - RNA, 20 nt, synthetic construct
  misc_feature 1..20: note = Synthetic Polynucleotide
  source 1..20: mol_type = other RNA
gttgacacattgtatttcca

SEQ ID NO: 386 - RNA, 20 nt, synthetic construct
  misc_feature 1..20: note = Synthetic Polynucleotide
  source 1..20: mol_type = other RNA
gagttgacacattgtatttc

SEQ ID NO: 387 - RNA, 20 nt, synthetic construct
  misc_feature 1..20: note = Synthetic Polynucleotide
  source 1..20: mol_type = other RNA
ataaaatagagccctgtcaa

SEQ ID NO: 388 - RNA, 20 nt, synthetic construct
  misc_feature 1..20: note = Synthetic Polynucleotide
  source 1..20: mol_type = other RNA
tgagagctgcaggtgtaatg

SEQ ID NO: 389 - RNA, 20 nt, synthetic construct
  misc_feature 1..20: note = Synthetic Polynucleotide
  source 1..20: mol_type = other RNA
gagagctgcaggtgtaatga

SEQ ID NO: 390 - RNA, 20 nt, synthetic construct
  misc_feature 1..20: note = Synthetic Polynucleotide
  source 1..20: mol_type = other RNA
cgacaccgaagcagagtttt

SEQ ID NO: 391 - RNA, 20 nt, synthetic construct
  misc_feature 1..20: note = Synthetic Polynucleotide
  source 1..20: mol_type = other RNA
gacaccgaagcagagttttt

SEQ ID NO: 392 - RNA, 20 nt, synthetic construct
  misc_feature 1..20: note = Synthetic Polynucleotide
  source 1..20: mol_type = other RNA
acaccgaagcagagttttta

SEQ ID NO: 393 - RNA, 20 nt, synthetic construct
  misc_feature 1..20: note = Synthetic Polynucleotide
  source 1..20: mol_type = other RNA
cgacaccgaagcagagtttt

SEQ ID NO: 394 - RNA, 22 nt, synthetic construct
  misc_feature 1..22: note = Synthetic Polynucleotide
  source 1..22: mol_type = other RNA
cgaagcagagtttttaggattc

SEQ ID NO: 395 - RNA, 20 nt, synthetic construct
  misc_feature 1..20: note = Synthetic Polynucleotide
  source 1..20: mol_type = other RNA
tactgcaattattcaggcca

SEQ ID NO: 396 - RNA, 20 nt, synthetic construct
  misc_feature 1..20: note = Synthetic Polynucleotide
  source 1..20: mol_type = other RNA
actgcaattattcaggccaa

SEQ ID NO: 397 - RNA, 20 nt, synthetic construct
  misc_feature 1..20: note = Synthetic Polynucleotide
  source 1..20: mol_type = other RNA
tactgcaattattcaggcca

SEQ ID NO: 398 - RNA, 20 nt, synthetic construct
  misc_feature 1..20: note = Synthetic Polynucleotide
  source 1..20: mol_type = other RNA
ccaccctgtgcataaataaa

SEQ ID NO: 399 - RNA, 20 nt, synthetic construct
  misc_feature 1..20: note = Synthetic Polynucleotide
  source 1..20: mol_type = other RNA
ccctgtgcataaataaaaag

SEQ ID NO: 400 - RNA, 20 nt, synthetic construct
  misc_feature 1..20: note = Synthetic Polynucleotide
  source 1..20: mol_type = other RNA
caccctgtgcataaataaaa

SEQ ID NO: 401 - RNA, 20 nt, synthetic construct
  misc_feature 1..20: note = Synthetic Polynucleotide
  source 1..20: mol_type = other RNA
caccctgtgcataaataaaa

SEQ ID NO: 402 - RNA, 30 nt, synthetic construct
  misc_feature 1..30: note = Synthetic Polynucleotide
  source 1..30: mol_type = other RNA
ttccaccctgtgcataaatatttatgcaca

SEQ ID NO: 403 - RNA, 10 nt, synthetic construct
  misc_feature 1..10: note = Synthetic Polynucleotide
  source 1..10: mol_type = other RNA
gggtggaaca

SEQ ID NO: 404 - RNA, 20 nt, synthetic construct
  misc_feature 1..20: note = Synthetic Polynucleotide
  source 1..20: mol_type = other RNA
tgcacagggtggaacaagat

SEQ ID NO: 405 - RNA, 20 nt, synthetic construct
  misc_feature 1..20: note = Synthetic Polynucleotide
  source 1..20: mol_type = other RNA
atttatgcacagggtggaac

SEQ ID NO: 406 - RNA, 20 nt, synthetic construct
  misc_feature 1..20: note = Synthetic Polynucleotide
  source 1..20: mol_type = other RNA
atgcacagggtggaacaaga

SEQ ID NO: 407 - RNA, 20 nt, synthetic construct
  misc_feature 1..20: note = Synthetic Polynucleotide
  source 1..20: mol_type = other RNA
gagggcaactaaatacattc

SEQ ID NO: 408 - RNA, 20 nt, synthetic construct
  misc_feature 1..20: note = Synthetic Polynucleotide
  source 1..20: mol_type = other RNA
agggcaactaaatacattct

SEQ ID NO: 409 - RNA, 20 nt, synthetic construct
  misc_feature 1..20: note = Synthetic Polynucleotide
  source 1..20: mol_type = other RNA
aaactgttttatacatcaat

SEQ ID NO: 410 - RNA, 20 nt, synthetic construct
  misc_feature 1..20: note = Synthetic Polynucleotide
  source 1..20: mol_type = other RNA
caaactgttttatacatcaa

SEQ ID NO: 411 - RNA, 21 nt, synthetic construct
  misc_feature 1..21: note = Synthetic Polynucleotide
  source 1..21: mol_type = other RNA
ccctgccaaaaaatcaatgtg

SEQ ID NO: 412 - RNA, 20 nt, synthetic construct
  misc_feature 1..20: note = Synthetic Polynucleotide
  source 1..20: mol_type = other RNA
cctgccaaaaaatcaatgtg

SEQ ID NO: 413 - RNA, 20 nt, synthetic construct
  misc_feature 1..20: note = Synthetic Polynucleotide
  source 1..20: mol_type = other RNA
gagccctgccaaaaaatcaa

SEQ ID NO: 414 - RNA, 20 nt, synthetic construct
  misc_feature 1..20: note = Synthetic Polynucleotide
  source 1..20: mol_type = other RNA
gccctgccaaaaaatcaatg

SEQ ID NO: 415 - RNA, 20 nt, synthetic construct
  misc_feature 1..20: note = Synthetic Polynucleotide
  source 1..20: mol_type = other RNA
tatacatcggagccctgcca

SEQ ID NO: 416 - RNA, 20 nt, synthetic construct
  misc_feature 1..20: note = Synthetic Polynucleotide
  source 1..20: mol_type = other RNA
catcggagccctgccaaaaa

SEQ ID NO: 417 - RNA, 20 nt, synthetic construct
  misc_feature 1..20: note = Synthetic Polynucleotide
  source 1..20: mol_type = other RNA
cctgcctccgctctactcac

SEQ ID NO: 418 - RNA, 20 nt, synthetic construct
  misc_feature 1..20: note = Synthetic Polynucleotide
  source 1..20: mol_type = other RNA
ctgcctccgctctactcact

SEQ ID NO: 419 - RNA, 20 nt, synthetic construct
  misc_feature 1..20: note = Synthetic Polynucleotide
  source 1..20: mol_type = other RNA
ctcctgcctccgctctactc

SEQ ID NO: 420 - RNA, 20 nt, synthetic construct
  misc_feature 1..20: note = Synthetic Polynucleotide
  source 1..20: mol_type = other RNA
aaccaaagatgaacaccagt

SEQ ID NO: 421 - RNA, 20 nt, synthetic construct
  misc_feature 1..20: note = Synthetic Polynucleotide
  source 1..20: mol_type = other RNA
caaaaccaaagatgaacacc

SEQ ID NO: 422 - RNA, 20 nt, synthetic construct
  misc_feature 1..20: note = Synthetic Polynucleotide
  source 1..20: mol_type = other RNA
acaaaaccaaagatgaacac

SEQ ID NO: 423 - RNA, 20 nt, synthetic construct
  misc_feature 1..20: note = Synthetic Polynucleotide
  source 1..20: mol_type = other RNA
aaaaccaaagatgaacacca

SEQ ID NO: 424 - RNA, 20 nt, synthetic construct
  misc_feature 1..20: note = Synthetic Polynucleotide
  source 1..20: mol_type = other RNA
ccacaaaaccaaagatgaac

SEQ ID NO: 425 - RNA, 20 nt, synthetic construct
  misc_feature 1..20: note = Synthetic Polynucleotide
  source 1..20: mol_type = other RNA
gcatgttgcccacaaaacca

SEQ ID NO: 426 - RNA, 20 nt, synthetic construct
  misc_feature 1..20: note = Synthetic Polynucleotide
  source 1..20: mol_type = other RNA
gttgcccacaaaaccaaaga

SEQ ID NO: 427 - RNA, 20 nt, synthetic construct
  misc_feature 1..20: note = Synthetic Polynucleotide
  source 1..20: mol_type = other RNA
catgttgcccacaaaaccaa

SEQ ID NO: 428 - RNA, 20 nt, synthetic construct
  misc_feature 1..20: note = Synthetic Polynucleotide
  source 1..20: mol_type = other RNA
agcatgttgcccacaaaacc

SEQ ID NO: 429 - RNA, 20 nt, synthetic construct
  misc_feature 1..20: note = Synthetic Polynucleotide
  source 1..20: mol_type = other RNA
gagaagaagcctataaaata

SEQ ID NO: 430 - RNA, 20 nt, synthetic construct
  misc_feature 1..20: note = Synthetic Polynucleotide
  source 1..20: mol_type = other RNA
cagagaagaagcctataaaa

SEQ ID NO: 431 - RNA, 29 nt, synthetic construct
  misc_feature 1..29: note = Synthetic Polynucleotide
  source 1..29: mol_type = other RNA
ccagagaagaagcctataaaatgaagaag

SEQ ID NO: 432 - RNA, 12 nt, synthetic construct
  misc_feature 1..12: note = Synthetic Polynucleotide
  source 1..12: mol_type = other RNA
attccagagaag

SEQ ID NO: 433 - RNA, 20 nt, synthetic construct
  misc_feature 1..20: note = Synthetic Polynucleotide
  source 1..20: mol_type = other RNA
gattccagagaagaagccta

SEQ ID NO: 434 - RNA, 20 nt, synthetic construct
  misc_feature 1..20: note = Synthetic Polynucleotide
  source 1..20: mol_type = other RNA
caccccaaaggtgaccgtcc

SEQ ID NO: 435 - RNA, 20 nt, synthetic construct
  misc_feature 1..20: note = Synthetic Polynucleotide
  source 1..20: mol_type = other RNA
cacacttgtcaccaccccaa

SEQ ID NO: 436 - RNA, 20 nt, synthetic construct
  misc_feature 1..20: note = Synthetic Polynucleotide
  source 1..20: mol_type = other RNA
tcacacttgtcaccacccca

SEQ ID NO: 437 - RNA, 20 nt, synthetic construct
  misc_feature 1..20: note = Synthetic Polynucleotide
  source 1..20: mol_type = other RNA
acttgtcaccaccccaaagg

SEQ ID NO: 438 - RNA, 20 nt, synthetic construct
  misc_feature 1..20: note = Synthetic Polynucleotide
  source 1..20: mol_type = other RNA
acacttgtcaccaccccaaa

SEQ ID NO: 439 - RNA, 20 nt, synthetic construct
  misc_feature 1..20: note = Synthetic Polynucleotide
  source 1..20: mol_type = other RNA
atcacacttgtcaccacccc

SEQ ID NO: 440 - RNA, 20 nt, synthetic construct
  misc_feature 1..20: note = Synthetic Polynucleotide
  source 1..20: mol_type = other RNA
ctcccaggaatcatctttac

SEQ ID NO: 441 - RNA, 20 nt, synthetic construct
  misc_feature 1..20: note = Synthetic Polynucleotide
  source 1..20: mol_type = other RNA
tcccaggaatcatctttacc

SEQ ID NO: 442 - RNA, 20 nt, synthetic construct
  misc_feature 1..20: note = Synthetic Polynucleotide
  source 1..20: mol_type = other RNA
tctcccaggaatcatcttta

SEQ ID NO: 443 - RNA, 20 nt, synthetic construct
  misc_feature 1..20: note = Synthetic Polynucleotide
  source 1..20: mol_type = other RNA
tcctgggagagacgcaaaca

SEQ ID NO: 444 - RNA, 20 nt, synthetic construct
  misc_feature 1..20: note = Synthetic Polynucleotide
  source 1..20: mol_type = other RNA
gtaaagatgattcctgggag

SEQ ID NO: 445 - RNA, 21 nt, synthetic construct
  misc_feature 1..21: note = Synthetic Polynucleotide
  source 1..21: mol_type = other RNA
ccatacagtcagtatcaattc

SEQ ID NO: 446 - RNA, 20 nt, synthetic construct
  misc_feature 1..20: note = Synthetic Polynucleotide
  source 1..20: mol_type = other RNA
catacagtcagtatcaattc

SEQ ID NO: 447 - RNA, 20 nt, synthetic construct
  misc_feature 1..20: note = Synthetic Polynucleotide
  source 1..20: mol_type = other RNA
gctctcattttccatacagt

SEQ ID NO: 448 - RNA, 20 nt, synthetic construct
  misc_feature 1..20: note = Synthetic Polynucleotide
  source 1..20: mol_type = other RNA
tcattttccatacagtcagt

SEQ ID NO: 449 - RNA, 20 nt, synthetic construct
  misc_feature 1..20: note = Synthetic Polynucleotide
  source 1..20: mol_type = other RNA
tcattttccatacagtcagt

SEQ ID NO: 450 - RNA, 20 nt, synthetic construct
  misc_feature 1..20: note = Synthetic Polynucleotide
  source 1..20: mol_type = other RNA
ggtcctgccgctgcttgtca

SEQ ID NO: 451 - RNA, 20 nt, synthetic construct
  misc_feature 1..20: note = Synthetic Polynucleotide
  source 1..20: mol_type = other RNA
ctggtcctgccgctgcttgt

SEQ ID NO: 452 - RNA, 20 nt, synthetic construct
  misc_feature 1..20: note = Synthetic Polynucleotide
  source 1..20: mol_type = other RNA
tcccgagtagcagatgacca

SEQ ID NO: 453 - RNA, 20 nt, synthetic construct
  misc_feature 1..20: note = Synthetic Polynucleotide
  source 1..20: mol_type = other RNA
taggattcccgagtagcaga

SEQ ID NO: 454 - RNA, 20 nt, synthetic construct
  misc_feature 1..20: note = Synthetic Polynucleotide
  source 1..20: mol_type = other RNA
ttttaggattcccgagtagc

SEQ ID NO: 455 - RNA, 20 nt, synthetic construct
  misc_feature 1..20: note = Synthetic Polynucleotide
  source 1..20: mol_type = other RNA
tctctgtcacctgcatagct

SEQ ID NO: 456 - RNA, 20 nt, synthetic construct
  misc_feature 1..20: note = Synthetic Polynucleotide
  source 1..20: mol_type = other RNA
aagagtctctgtcacctgca

SEQ ID NO: 457 - RNA, 20 nt, synthetic construct
  misc_feature 1..20: note = Synthetic Polynucleotide
  source 1..20: mol_type = other RNA
agtctctgtcacctgcatag

SEQ ID NO: 458 - RNA, 22 nt, synthetic construct
  misc_feature 1..22: note = Synthetic Polynucleotide
  source 1..22: mol_type = other RNA
ccaagagtctctgtcacctgca

SEQ ID NO: 459 - RNA, 20 nt, synthetic construct
  misc_feature 1..20: note = Synthetic Polynucleotide
  source 1..20: mol_type = other RNA
gcagcagtgcgtcatcccaa

SEQ ID NO: 460 - RNA, 20 nt, synthetic construct
  misc_feature 1..20: note = Synthetic Polynucleotide
  source 1..20: mol_type = other RNA
tgcagcagtgcgtcatccca

SEQ ID NO: 461 - RNA, 20 nt, synthetic construct
  misc_feature 1..20: note = Synthetic Polynucleotide
  source 1..20: mol_type = other RNA
atgcagcagtgcgtcatccc

SEQ ID NO: 462 - RNA, 20 nt, synthetic construct
  misc_feature 1..20: note = Synthetic Polynucleotide
  source 1..20: mol_type = other RNA
atgcagcagtgcgtcatccc

SEQ ID NO: 463 - RNA, 20 nt, synthetic construct
  misc_feature 1..20: note = Synthetic Polynucleotide
  source 1..20: mol_type = other RNA
gcagcagtgcgtcatcccaa

SEQ ID NO: 464 - RNA, 20 nt, synthetic construct
  misc_feature 1..20: note = Synthetic Polynucleotide
  source 1..20: mol_type = other RNA
atgcagcagtgcgtcatccc

SEQ ID NO: 465 - RNA, 20 nt, synthetic construct
  misc_feature 1..20: note = Synthetic Polynucleotide
  source 1..20: mol_type = other RNA
atgcagcagtgcgtcatccc

SEQ ID NO: 466 - RNA, 20 nt, synthetic construct
  misc_feature 1..20: note = Synthetic Polynucleotide
  source 1..20: mol_type = other RNA
cccatcatctatgcctttgt

SEQ ID NO: 467 - RNA, 19 nt, synthetic construct
  misc_feature 1..19: note = Synthetic Polynucleotide
  source 1..19: mol_type = other RNA
ccatcatctatgcctttgt

SEQ ID NO: 468 - RNA, 20 nt, synthetic construct
  misc_feature 1..20: note = Synthetic Polynucleotide
  source 1..20: mol_type = other RNA
ggctcccgagcgagcaagct

SEQ ID NO: 469 - RNA, 20 nt, synthetic construct
  misc_feature 1..20: note = Synthetic Polynucleotide
  source 1..20: mol_type = other RNA
caagaggctcccgagcgagc

SEQ ID NO: 470 - RNA, 20 nt, synthetic construct
  misc_feature 1..20: note = Synthetic Polynucleotide
  source 1..20: mol_type = other RNA
gaggctcccgagcgagcaag

SEQ ID NO: 471 - RNA, 20 nt, synthetic construct
  misc_feature 1..20: note = Synthetic Polynucleotide
  source 1..20: mol_type = other RNA
caagtgtcaagtccaatcta

SEQ ID NO: 472 - RNA, 20 nt, synthetic construct
  misc_feature 1..20: note = Synthetic Polynucleotide
  source 1..20: mol_type = other RNA
aagatggattatcaagtgtc

SEQ ID NO: 473 - RNA, 20 nt, synthetic construct
  misc_feature 1..20: note = Synthetic Polynucleotide
  source 1..20: mol_type = other RNA
cctgccaaaaaatcaatgtg

SEQ ID NO: 474 - RNA, 20 nt, synthetic construct
  misc_feature 1..20: note = Synthetic Polynucleotide
  source 1..20: mol_type = other RNA
tgccaaaaaatcaatgtgaa

SEQ ID NO: 475 - RNA, 20 nt, synthetic construct
  misc_feature 1..20: note = Synthetic Polynucleotide
  source 1..20: mol_type = other RNA
cccagaaggggacagtaaga

SEQ ID NO: 476 - RNA, 20 nt, synthetic construct
  misc_feature 1..20: note = Synthetic Polynucleotide
  source 1..20: mol_type = other RNA
gcccagaaggggacagtaag

SEQ ID NO: 477 - RNA, 20 nt, synthetic construct
  misc_feature 1..20: note = Synthetic Polynucleotide
  source 1..20: mol_type = other RNA
gagcccagaaggggacagta

SEQ ID NO: 478 - RNA, 20 nt, synthetic construct
  misc_feature 1..20: note = Synthetic Polynucleotide
  source 1..20: mol_type = other RNA
tgagcccagaaggggacagt

SEQ ID NO: 479 - RNA, 21 nt, synthetic construct
  misc_feature 1..21: note = Synthetic Polynucleotide
  source 1..21: mol_type = other RNA
agcatagtgagcccagaaggg

SEQ ID NO: 480 - RNA, 20 nt, synthetic construct
  misc_feature 1..20: note = Synthetic Polynucleotide
  source 1..20: mol_type = other RNA
gctgccgcccagtgggactt

SEQ ID NO: 481 - RNA, 20 nt, synthetic construct
  misc_feature 1..20: note = Synthetic Polynucleotide
  source 1..20: mol_type = other RNA
ctgccgcccagtgggacttt

SEQ ID NO: 482 - RNA, 20 nt, synthetic construct
  misc_feature 1..20: note = Synthetic Polynucleotide
  source 1..20: mol_type = other RNA
ctgccgcccagtgggacttt

SEQ ID NO: 483 - RNA, 20 nt, synthetic construct
  misc_feature 1..20: note = Synthetic Polynucleotide
  source 1..20: mol_type = other RNA
gcccagtgggactttggaaa

SEQ ID NO: 484 - RNA, 20 nt, synthetic construct
  misc_feature 1..20: note = Synthetic Polynucleotide
  source 1..20: mol_type = other RNA
agtcccactgggcggcagca

SEQ ID NO: 485 - RNA, 20 nt, synthetic construct
  misc_feature 1..20: note = Synthetic Polynucleotide
  source 1..20: mol_type = other RNA
tccaaagtcccactgggcgg

SEQ ID NO: 486 - RNA, 20 nt, synthetic construct
  misc_feature 1..20: note = Synthetic Polynucleotide
  source 1..20: mol_type = other RNA
cccactgggcggcagcatag

SEQ ID NO: 487 - RNA, 20 nt, synthetic construct
  misc_feature 1..20: note = Synthetic Polynucleotide
  source 1..20: mol_type = other RNA
gtcccactgggcggcagcat

SEQ ID NO: 488 - RNA, 21 nt, synthetic construct
  misc_feature 1..21: note = Synthetic Polynucleotide
  source 1..21: mol_type = other RNA
caaagtcccactgggcggcag

SEQ ID NO: 489 - RNA, 20 nt, synthetic construct
  misc_feature 1..20: note = Synthetic Polynucleotide
  source 1..20: mol_type = other RNA
caatgtgtcaactcttgaca

SEQ ID NO: 490 - RNA, 20 nt, synthetic construct
  misc_feature 1..20: note = Synthetic Polynucleotide
  source 1..20: mol_type = other RNA
acaatgtgtcaactcttgac

SEQ ID NO: 491 - RNA, 20 nt, synthetic construct
  misc_feature 1..20: note = Synthetic Polynucleotide
  source 1..20: mol_type = other RNA
tttaccagatctcaaaaaga

SEQ ID NO: 492 - RNA, 20 nt, synthetic construct
  misc_feature 1..20: note = Synthetic Polynucleotide
  source 1..20: mol_type = other RNA
acagtcagtatcaattctgg

SEQ ID NO: 493 - RNA, 20 nt, synthetic construct
  misc_feature 1..20: note = Synthetic Polynucleotide
  source 1..20: mol_type = other RNA
catacagtcagtatcaattc

SEQ ID NO: 494 - RNA, 20 nt, synthetic construct
  misc_feature 1..20: note = Synthetic Polynucleotide
  source 1..20: mol_type = other RNA
atacagtcagtatcaattct

SEQ ID NO: 495 - RNA, 20 nt, synthetic construct
  misc_feature 1..20: note = Synthetic Polynucleotide
  source 1..20: mol_type = other RNA
cagtcagtatcaattctgga

SEQ ID NO: 496 - RNA, 20 nt, synthetic construct
  misc_feature 1..20: note = Synthetic Polynucleotide
  source 1..20: mol_type = other RNA
acagtcagtatcaattctgg

SEQ ID NO: 497 - RNA, 20 nt, synthetic construct
  misc_feature 1..20: note = Synthetic Polynucleotide
  source 1..20: mol_type = other RNA
atcaattctggaagaatttc

SEQ ID NO: 498 - RNA, 20 nt, synthetic construct
  misc_feature 1..20: note = Synthetic Polynucleotide
  source 1..20: mol_type = other RNA
acagtcagtatcaattctgg

SEQ ID NO: 499 - RNA, 20 nt, synthetic construct
  misc_feature 1..20: note = Synthetic Polynucleotide
  source 1..20: mol_type = other RNA
cagtcagtatcaattctgga

SEQ ID NO: 500 - RNA, 20 nt, synthetic construct
  misc_feature 1..20: note = Synthetic Polynucleotide
  source 1..20: mol_type = other RNA
tcaattctggaagaatttcc

SEQ ID NO: 501 - RNA, 20 nt, synthetic construct
  misc_feature 1..20: note = Synthetic Polynucleotide
  source 1..20: mol_type = other RNA
acagtcagtatcaattctgg

SEQ ID NO: 502 - RNA, 20 nt, synthetic construct
  misc_feature 1..20: note = Synthetic Polynucleotide
  source 1..20: mol_type = other RNA
cagaattgatactgactgta

SEQ ID NO: 503 - RNA, 20 nt, synthetic construct
  misc_feature 1..20: note = Synthetic Polynucleotide
  source 1..20: mol_type = other RNA
aattcttccagaattgatac

SEQ ID NO: 504 - RNA, 20 nt, synthetic construct
  misc_feature 1..20: note = Synthetic Polynucleotide
  source 1..20: mol_type = other RNA
gaatttccagacattaaaga

SEQ ID NO: 505 - RNA, 20 nt, synthetic construct
  misc_feature 1..20: note = Synthetic Polynucleotide
  source 1..20: mol_type = other RNA
ggaagaatttccagacatta

SEQ ID NO: 506 - RNA, 20 nt, synthetic construct
  misc_feature 1..20: note = Synthetic Polynucleotide
  source 1..20: mol_type = other RNA
gaagaatttccagacattaa

SEQ ID NO: 507 - RNA, 20 nt, synthetic construct
  misc_feature 1..20: note = Synthetic Polynucleotide
  source 1..20: mol_type = other RNA
tggaagaatttccagacatt

SEQ ID NO: 508 - RNA, 20 nt, synthetic construct
  misc_feature 1..20: note = Synthetic Polynucleotide
  source 1..20: mol_type = other RNA
aagaatttccagacattaaa

SEQ ID NO: 509 - RNA, 21 nt, synthetic construct
  misc_feature 1..21: note = Synthetic Polynucleotide
  source 1..21: mol_type = other RNA
ccagaagagaaaataaacaat

SEQ ID NO: 510 - RNA, 20 nt, synthetic construct
  misc_feature 1..20: note = Synthetic Polynucleotide
  source 1..20: mol_type = other RNA
ggagcccagaagagaaaata

SEQ ID NO: 511 - RNA, 20 nt, synthetic construct
  misc_feature 1..20: note = Synthetic Polynucleotide
  source 1..20: mol_type = other RNA
aacaccttccaggaattctt

SEQ ID NO: 512 - RNA, 20 nt, synthetic construct
  misc_feature 1..20: note = Synthetic Polynucleotide
  source 1..20: mol_type = other RNA
cttccaggaattctttggcc

SEQ ID NO: 513 - RNA, 20 nt, synthetic construct
  misc_feature 1..20: note = Synthetic Polynucleotide
  source 1..20: mol_type = other RNA
ccttccaggaattctttggc

SEQ ID NO: 514 - RNA, 20 nt, synthetic construct
  misc_feature 1..20: note = Synthetic Polynucleotide
  source 1..20: mol_type = other RNA
tccaggaattctttggcctg

SEQ ID NO: 515 - RNA, 20 nt, synthetic construct
  misc_feature 1..20: note = Synthetic Polynucleotide
  source 1..20: mol_type = other RNA
ggaccaagctatgcaggtga

SEQ ID NO: 516 - RNA, 20 nt, synthetic construct
  misc_feature 1..20: note = Synthetic Polynucleotide
  source 1..20: mol_type = other RNA
accaagctatgcaggtgaca

SEQ ID NO: 517 - RNA, 20 nt, synthetic construct
  misc_feature 1..20: note = Synthetic Polynucleotide
  source 1..20: mol_type = other RNA
acaggttggaccaagctatg

SEQ ID NO: 518 - RNA, 20 nt, synthetic construct
  misc_feature 1..20: note = Synthetic Polynucleotide
  source 1..20: mol_type = other RNA
caggttggaccaagctatgc

SEQ ID NO: 519 - RNA, 20 nt, synthetic construct
  misc_feature 1..20: note = Synthetic Polynucleotide
  source 1..20: mol_type = other RNA
aggttggaccaagctatgca

SEQ ID NO: 520 - RNA, 20 nt, synthetic construct
  misc_feature 1..20: note = Synthetic Polynucleotide
  source 1..20: mol_type = other RNA
gttggaccaagctatgcagg

SEQ ID NO: 521 - RNA, 20 nt, synthetic construct
  misc_feature 1..20: note = Synthetic Polynucleotide
  source 1..20: mol_type = other RNA
gaccaagctatgcaggtgac

SEQ ID NO: 522 - RNA, 20 nt, synthetic construct
  misc_feature 1..20: note = Synthetic Polynucleotide
  source 1..20: mol_type = other RNA
aacaggttggaccaagctat

SEQ ID NO: 523 - RNA, 20 nt, synthetic construct
  misc_feature 1..20: note = Synthetic Polynucleotide
  source 1..20: mol_type = other RNA
atgcaggtgacagagactct

SEQ ID NO: 524 - RNA, 20 nt, synthetic construct
  misc_feature 1..20: note = Synthetic Polynucleotide
  source 1..20: mol_type = other RNA
tgcaggtgacagagactctt

SEQ ID NO: 525 - RNA, 20 nt, synthetic construct
  misc_feature 1..20: note = Synthetic Polynucleotide
  source 1..20: mol_type = other RNA
gaccaagctatgcaggtgac

SEQ ID NO: 526 - RNA, 20 nt, synthetic construct
  misc_feature 1..20: note = Synthetic Polynucleotide
  source 1..20: mol_type = other RNA
accaagctatgcaggtgaca

SEQ ID NO: 527 - RNA, 20 nt, synthetic construct
  misc_feature 1..20: note = Synthetic Polynucleotide
  source 1..20: mol_type = other RNA
ccaagctatgcaggtgacag

SEQ ID NO: 528 - RNA, 20 nt, synthetic construct
  misc_feature 1..20: note = Synthetic Polynucleotide
  source 1..20: mol_type = other RNA
gcaggtgacagagactcttg

SEQ ID NO: 529 - RNA, 20 nt, synthetic construct
  misc_feature 1..20: note = Synthetic Polynucleotide
  source 1..20: mol_type = other RNA
atgcaggtgacagagactct

SEQ ID NO: 530 - RNA, 20 nt, synthetic construct
  misc_feature 1..20: note = Synthetic Polynucleotide
  source 1..20: mol_type = other RNA
ttttccagcaagaggctccc

SEQ ID NO: 531 - RNA, 20 nt, synthetic construct
  misc_feature 1..20: note = Synthetic Polynucleotide
  source 1..20: mol_type = other RNA
attttccagcaagaggctcc

SEQ ID NO: 532 - RNA, 20 nt, synthetic construct
  misc_feature 1..20: note = Synthetic Polynucleotide
  source 1..20: mol_type = other RNA
tttccagcaagaggctcccg

SEQ ID NO: 533 - RNA, 20 nt, synthetic construct
  misc_feature 1..20: note = Synthetic Polynucleotide
  source 1..20: mol_type = other RNA
tccagcaagaggctcccgag

SEQ ID NO: 534 - RNA, 20 nt, synthetic construct
  misc_feature 1..20: note = Synthetic Polynucleotide
  source 1..20: mol_type = other RNA
ccagcaagaggctcccgagc

SEQ ID NO: 535 - RNA, 20 nt, synthetic construct
  misc_feature 1..20: note = Synthetic Polynucleotide
  source 1..20: mol_type = other RNA
ggctcccgagcgagcaagct

SEQ ID NO: 536 - RNA, 20 nt, synthetic construct
  misc_feature 1..20: note = Synthetic Polynucleotide
  source 1..20: mol_type = other RNA
gaggctcccgagcgagcaag

SEQ ID NO: 537 - RNA, 20 nt, synthetic construct
  misc_feature 1..20: note = Synthetic Polynucleotide
  source 1..20: mol_type = other RNA
gcgagcaagctcagtttaca

SEQ ID NO: 538 - RNA, 20 nt, synthetic construct
  misc_feature 1..20: note = Synthetic Polynucleotide
  source 1..20: mol_type = other RNA
gtttacacccgatccactgg

SEQ ID NO: 539 - RNA, 20 nt, synthetic construct
  misc_feature 1..20: note = Synthetic Polynucleotide
  source 1..20: mol_type = other RNA
acacccgatccactggggag

SEQ ID NO: 540 - RNA, 20 nt, synthetic construct
  misc_feature 1..20: note = Synthetic Polynucleotide
  source 1..20: mol_type = other RNA
cacccgatccactggggagc

SEQ ID NO: 541 - RNA, 20 nt, synthetic construct
  misc_feature 1..20: note = Synthetic Polynucleotide
  source 1..20: mol_type = other RNA
acccgatccactggggagca

SEQ ID NO: 542 - RNA, 20 nt, synthetic construct
  misc_feature 1..20: note = Synthetic Polynucleotide
  source 1..20: mol_type = other RNA
acccgatccactggggagca

SEQ ID NO: 543 - RNA, 20 nt, synthetic construct
  misc_feature 1..20: note = Synthetic Polynucleotide
  source 1..20: mol_type = other RNA
ggggagcaggaaatatctgt

SEQ ID NO: 544 - RNA, 20 nt, synthetic construct
  misc_feature 1..20: note = Synthetic Polynucleotide
  source 1..20: mol_type = other RNA
tggggagcaggaaatatctg

SEQ ID NO: 545 - RNA, 20 nt, synthetic construct
  misc_feature 1..20: note = Synthetic Polynucleotide
  source 1..20: mol_type = other RNA
actggggagcaggaaatatc

SEQ ID NO: 546 - RNA, 20 nt, synthetic construct
  misc_feature 1..20: note = Synthetic Polynucleotide
  source 1..20: mol_type = other RNA
gcaggaaatatctgtgggct

SEQ ID NO: 547 - RNA, 20 nt, synthetic construct
  misc_feature 1..20: note = Synthetic Polynucleotide
  source 1..20: mol_type = other RNA
gaggctcccgagcgagcaag

SEQ ID NO: 548 - RNA, 20 nt, synthetic construct
  misc_feature 1..20: note = Synthetic Polynucleotide
  source 1..20: mol_type = other RNA
gaggctcccgagcgagcaag

SEQ ID NO: 549 - RNA, 20 nt, synthetic construct
  misc_feature 1..20: note = Synthetic Polynucleotide
  source 1..20: mol_type = other RNA
tccaaagtcccactgggcgg

SEQ ID NO: 550 - RNA, 20 nt, synthetic construct
  misc_feature 1..20: note = Synthetic Polynucleotide
  source 1..20: mol_type = other RNA
gcagcagtgcgtcatcccaa

SEQ ID NO: 551 - RNA, 20 nt, synthetic construct
  misc_feature 1..20: note = Synthetic Polynucleotide
  source 1..20: mol_type = other RNA
gagccctgccaaaaaatcaa

SEQ ID NO: 552 - RNA, 21 nt, synthetic construct
  misc_feature 1..21: note = Synthetic Polynucleotide
  source 1..21: mol_type = other RNA
caaagtcccactgggcggcag

SEQ ID NO: 553 - RNA, 20 nt, synthetic construct
  misc_feature 1..20: note = Synthetic Polynucleotide
  source 1..20: mol_type = other RNA
tttccagcaagaggctcccg

SEQ ID NO: 554 - RNA, 20 nt, synthetic construct
  misc_feature 1..20: note = Synthetic Polynucleotide
  source 1..20: mol_type = other RNA
acagtcagtatcaattctgg

SEQ ID NO: 555 - RNA, 20 nt, synthetic construct
  misc_feature 1..20: note = Synthetic Polynucleotide
  source 1..20: mol_type = other RNA
gattccagagaagaagccta

SEQ ID NO: 556 - RNA, 20 nt, synthetic construct
  misc_feature 1..20: note = Synthetic Polynucleotide
  source 1..20: mol_type = other RNA
tatacatcggagccctgcca

SEQ ID NO: 557 - RNA, 20 nt, synthetic construct
  misc_feature 1..20: note = Synthetic Polynucleotide
  source 1..20: mol_type = other RNA
gagcaagctcagtttacacc

SEQ ID NO: 558 - RNA, 20 nt, synthetic construct
  misc_feature 1..20: note = Synthetic Polynucleotide
  source 1..20: mol_type = other RNA
gtttacacccgatccactgg

SEQ ID NO: 559 - RNA, 20 nt, synthetic construct
  misc_feature 1..20: note = Synthetic Polynucleotide
  source 1..20: mol_type = other RNA
aggttggaccaagctatgca

SEQ ID NO: 560 - RNA, 20 nt, synthetic construct
  misc_feature 1..20: note = Synthetic Polynucleotide
  source 1..20: mol_type = other RNA
agtctctgtcacctgcatag

SEQ ID NO: 561 - RNA, 20 nt, synthetic construct
  misc_feature 1..20: note = Synthetic Polynucleotide
  source 1..20: mol_type = other RNA
aaaaccaaagatgaacacca

SEQ ID NO: 562 - RNA, 20 nt, synthetic construct
  misc_feature 1..20: note = Synthetic Polynucleotide
  source 1..20: mol_type = other RNA
gtaaagatgattcctgggag

SEQ ID NO: 563 - RNA, 20 nt, synthetic construct
  misc_feature 1..20: note = Synthetic Polynucleotide
  source 1..20: mol_type = other RNA
acagtcagtatcaattctgg

SEQ ID NO: 564 - RNA, 20 nt, synthetic construct
  misc_feature 1..20: note = Synthetic Polynucleotide
  source 1..20: mol_type = other RNA
ggagcccagaagagaaaata

SEQ ID NO: 565 - RNA, 20 nt, synthetic construct
  misc_feature 1..20: note = Synthetic Polynucleotide
  source 1..20: mol_type = other RNA
catgttgcccacaaaaccaa

SEQ ID NO: 566 - RNA, 20 nt, synthetic construct
  misc_feature 1..20: note = Synthetic Polynucleotide
  source 1..20: mol_type = other RNA
acaggttggaccaagctatg

SEQ ID NO: 567 - RNA, 20 nt, synthetic construct
  misc_feature 1..20: note = Synthetic Polynucleotide
  source 1..20: mol_type = other RNA
aacaggttggaccaagctat

SEQ ID NO: 568 - RNA, 20 nt, synthetic construct
  misc_feature 1..20: note = Synthetic Polynucleotide
  source 1..20: mol_type = other RNA
tcattttccatacagtcagt

SEQ ID NO: 569 - RNA, 20 nt, synthetic construct
  misc_feature 1..20: note = Synthetic Polynucleotide
  source 1..20: mol_type = other RNA
tcattttccatacagtcagt

SEQ ID NO: 570 - RNA, 20 nt, synthetic construct
  misc_feature 1..20: note = Synthetic Polynucleotide
  source 1..20: mol_type = other RNA
gcgagcaagctcagtttaca

SEQ ID NO: 571 - RNA, 20 nt, synthetic construct
  misc_feature 1..20: note = Synthetic Polynucleotide
  source 1..20: mol_type = other RNA
atcacacttgtcaccacccc

SEQ ID NO: 572 - RNA, 20 nt, synthetic construct
  misc_feature 1..20: note = Synthetic Polynucleotide
  source 1..20: mol_type = other RNA
ttggcagggctccgatgtat

SEQ ID NO: 573 - RNA, 20 nt, synthetic construct
  misc_feature 1..20: note = Synthetic Polynucleotide
  source 1..20: mol_type = other RNA
caagtgtcaagtccaatcta

SEQ ID NO: 574 - RNA, 20 nt, synthetic construct
  misc_feature 1..20: note = Synthetic Polynucleotide
  source 1..20: mol_type = other RNA
tgagagctgcaggtgtaatg

SEQ ID NO: 575 - RNA, 20 nt, synthetic construct
  misc_feature 1..20: note = Synthetic Polynucleotide
  source 1..20: mol_type = other RNA
caagaggctcccgagcgagc

SEQ ID NO: 576 - RNA, 20 nt, synthetic construct
  misc_feature 1..20: note = Synthetic Polynucleotide
  source 1..20: mol_type = other RNA
gcccagtgggactttggaaa

SEQ ID NO: 577 - RNA, 20 nt, synthetic construct
  misc_feature 1..20: note = Synthetic Polynucleotide
  source 1..20: mol_type = other RNA
cagggctccgatgtataata

SEQ ID NO: 578 - RNA, 20 nt, synthetic construct
  misc_feature 1..20: note = Synthetic Polynucleotide
  source 1..20: mol_type = other RNA
taatccatcttgttccaccc

SEQ ID NO: 579 - RNA, 20 nt, synthetic construct
  misc_feature 1..20: note = Synthetic Polynucleotide
  source 1..20: mol_type = other RNA
ggctcccgagcgagcaagct

SEQ ID NO: 580 - RNA, 20 nt, synthetic construct
  misc_feature 1..20: note = Synthetic Polynucleotide
  source 1..20: mol_type = other RNA
ggctcccgagcgagcaagct

SEQ ID NO: 581 - RNA, 20 nt, synthetic construct
  misc_feature 1..20: note = Synthetic Polynucleotide
  source 1..20: mol_type = other RNA
taggattcccgagtagcaga

SEQ ID NO: 582 - RNA, 20 nt, synthetic construct
  misc_feature 1..20: note = Synthetic Polynucleotide
  source 1..20: mol_type = other RNA
gagcccagaaggggacagta

SEQ ID NO: 583 - RNA, 20 nt, synthetic construct
  misc_feature 1..20: note = Synthetic Polynucleotide
  source 1..20: mol_type = other RNA
atgcagcagtgcgtcatccc

SEQ ID NO: 584 - RNA, 20 nt, synthetic construct
  misc_feature 1..20: note = Synthetic Polynucleotide
  source 1..20: mol_type = other RNA
acttgtcaccaccccaaagg

SEQ ID NO: 585 - RNA, 20 nt, synthetic construct
  misc_feature 1..20: note = Synthetic Polynucleotide
  source 1..20: mol_type = other RNA
actgcaattattcaggccaa

SEQ ID NO: 586 - RNA, 21 nt, synthetic construct
  misc_feature 1..21: note = Synthetic Polynucleotide
  source 1..21: mol_type = other RNA
ccatcttgttccaccctgtgc

SEQ ID NO: 587 - RNA, 20 nt, synthetic construct
  misc_feature 1..20: note = Synthetic Polynucleotide
  source 1..20: mol_type = other RNA
gagagctgcaggtgtaatga

SEQ ID NO: 588 - RNA, 20 nt, synthetic construct
  misc_feature 1..20: note = Synthetic Polynucleotide
  source 1..20: mol_type = other RNA
cacacttgtcaccaccccaa

SEQ ID NO: 589 - RNA, 20 nt, synthetic construct
  misc_feature 1..20: note = Synthetic Polynucleotide
  source 1..20: mol_type = other RNA
catcggagccctgccaaaaa

SEQ ID NO: 590 - RNA, 20 nt, synthetic construct
  misc_feature 1..20: note = Synthetic Polynucleotide
  source 1..20: mol_type = other RNA
tccaggaattctttggcctg

SEQ ID NO: 591 - RNA, 20 nt, synthetic construct
  misc_feature 1..20: note = Synthetic Polynucleotide
  source 1..20: mol_type = other RNA
atgcagcagtgcgtcatccc

SEQ ID NO: 592 - RNA, 20 nt, synthetic construct
  misc_feature 1..20: note = Synthetic Polynucleotide
  source 1..20: mol_type = other RNA
ctgccgcccagtgggacttt

SEQ ID NO: 593 - RNA, 20 nt, synthetic construct
  misc_feature 1..20: note = Synthetic Polynucleotide
  source 1..20: mol_type = other RNA
tactgcaattattcaggcca

SEQ ID NO: 594 - RNA, 20 nt, synthetic construct
  misc_feature 1..20: note = Synthetic Polynucleotide
  source 1..20: mol_type = other RNA
ctggtcctgccgctgcttgt

SEQ ID NO: 595 - RNA, 20 nt, synthetic construct
  misc_feature 1..20: note = Synthetic Polynucleotide
  source 1..20: mol_type = other RNA
gttgcccacaaaaccaaaga

SEQ ID NO: 596 - RNA, 20 nt, synthetic construct
  misc_feature 1..20: note = Synthetic Polynucleotide
  source 1..20: mol_type = other RNA
agcatgttgcccacaaaacc

SEQ ID NO: 597 - RNA, 20 nt, synthetic construct
  misc_feature 1..20: note = Synthetic Polynucleotide
  source 1..20: mol_type = other RNA
gctgccgcccagtgggactt

SEQ ID NO: 598 - RNA, 20 nt, synthetic construct
  misc_feature 1..20: note = Synthetic Polynucleotide
  source 1..20: mol_type = other RNA
acccgatccactggggagca

SEQ ID NO: 599 - RNA, 20 nt, synthetic construct
  misc_feature 1..20: note = Synthetic Polynucleotide
  source 1..20: mol_type = other RNA
cctgcctccgctctactcac

SEQ ID NO: 600 - RNA, 20 nt, synthetic construct
  misc_feature 1..20: note = Synthetic Polynucleotide
  source 1..20: mol_type = other RNA
tcccgagtagcagatgacca

SEQ ID NO: 601 - RNA, 20 nt, synthetic construct
  misc_feature 1..20: note = Synthetic Polynucleotide
  source 1..20: mol_type = other RNA
tgcacagggtggaacaagat

SEQ ID NO: 602 - RNA, 20 nt, synthetic construct
  misc_feature 1..20: note = Synthetic Polynucleotide
  source 1..20: mol_type = other RNA
atgcacagggtggaacaaga

SEQ ID NO: 603 - RNA, 20 nt, synthetic construct
  misc_feature 1..20: note = Synthetic Polynucleotide
  source 1..20: mol_type = other RNA
ttccaccctgtgcataaata

SEQ ID NO: 604 - RNA, 20 nt, synthetic construct
  misc_feature 1..20: note = Synthetic Polynucleotide
  source 1..20: mol_type = other RNA
ccctgtgcataaataaaaag

SEQ ID NO: 605 - RNA, 20 nt, synthetic construct
  misc_feature 1..20: note = Synthetic Polynucleotide
  source 1..20: mol_type = other RNA
caggttggaccaagctatgc

SEQ ID NO: 606 - RNA, 20 nt, synthetic construct
  misc_feature 1..20: note = Synthetic Polynucleotide
  source 1..20: mol_type = other RNA
ctgccgcccagtgggacttt

SEQ ID NO: 607 - RNA, 22 nt, synthetic construct
  misc_feature 1..22: note = Synthetic Polynucleotide
  source 1..22: mol_type = other RNA
cgaagcagagtttttaggattc

SEQ ID NO: 608 - RNA, 20 nt, synthetic construct
  misc_feature 1..20: note = Synthetic Polynucleotide
  source 1..20: mol_type = other RNA
ccacaaaaccaaagatgaac

SEQ ID NO: 609 - RNA, 20 nt, synthetic construct
  misc_feature 1..20: note = Synthetic Polynucleotide
  source 1..20: mol_type = other RNA
ggtcctgccgctgcttgtca

SEQ ID NO: 610 - RNA, 20 nt, synthetic construct
  misc_feature 1..20: note = Synthetic Polynucleotide
  source 1..20: mol_type = other RNA
ctcctgcctccgctctactc

SEQ ID NO: 611 - RNA, 20 nt, synthetic construct
  misc_feature 1..20: note = Synthetic Polynucleotide
  source 1..20: mol_type = other RNA
cccactgggcggcagcatag

SEQ ID NO: 612 - RNA, 20 nt, synthetic construct
  misc_feature 1..20: note = Synthetic Polynucleotide
  source 1..20: mol_type = other RNA
atttatgcacagggtggaac

SEQ ID NO: 613 - RNA, 20 nt, synthetic construct
  misc_feature 1..20: note = Synthetic Polynucleotide
  source 1..20: mol_type = other RNA
tttatgcacagggtggaaca

SEQ ID NO: 614 - RNA, 20 nt, synthetic construct
  misc_feature 1..20: note = Synthetic Polynucleotide
  source 1..20: mol_type = other RNA
tgcagcagtgcgtcatccca

SEQ ID NO: 615 - RNA, 20 nt, synthetic construct
  misc_feature 1..20: note = Synthetic Polynucleotide
  source 1..20: mol_type = other RNA
cagaattgatactgactgta

SEQ ID NO: 616 - RNA, 20 nt, synthetic construct
  misc_feature 1..20: note = Synthetic Polynucleotide
  source 1..20: mol_type = other RNA
acaatgtgtcaactcttgac

SEQ ID NO: 617 - RNA, 20 nt, synthetic construct
  misc_feature 1..20: note = Synthetic Polynucleotide
  source 1..20: mol_type = other RNA
tgccaaaaaatcaatgtgaa

SEQ ID NO: 618 - RNA, 20 nt, synthetic construct
  misc_feature 1..20: note = Synthetic Polynucleotide
  source 1..20: mol_type = other RNA
gagggcaactaaatacattc

SEQ ID NO: 619 - RNA, 20 nt, synthetic construct
  misc_feature 1..20: note = Synthetic Polynucleotide
  source 1..20: mol_type = other RNA
atgcaggtgacagagactct

SEQ ID NO: 620 - RNA, 20 nt, synthetic construct
  misc_feature 1..20: note = Synthetic Polynucleotide
  source 1..20: mol_type = other RNA
cacccgatccactggggagc

SEQ ID NO: 621 - RNA, 20 nt, synthetic construct
  misc_feature 1..20: note = Synthetic Polynucleotide
  source 1..20: mol_type = other RNA
acaccgaagcagagttttta

SEQ ID NO: 622 - RNA, 20 nt, synthetic construct
  misc_feature 1..20: note = Synthetic Polynucleotide
  source 1..20: mol_type = other RNA
tctcccaggaatcatcttta

SEQ ID NO: 623 - RNA, 20 nt, synthetic construct
  misc_feature 1..20: note = Synthetic Polynucleotide
  source 1..20: mol_type = other RNA
cttccaggaattctttggcc

SEQ ID NO: 624 - RNA, 20 nt, synthetic construct
  misc_feature 1..20: note = Synthetic Polynucleotide
  source 1..20: mol_type = other RNA
agggcaactaaatacattct

SEQ ID NO: 625 - RNA, 20 nt, synthetic construct
  misc_feature 1..20: note = Synthetic Polynucleotide
  source 1..20: mol_type = other RNA
aattcttccagaattgatac

SEQ ID NO: 626 - RNA, 20 nt, synthetic construct
  misc_feature 1..20: note = Synthetic Polynucleotide
  source 1..20: mol_type = other RNA
tcccaggaatcatctttacc

SEQ ID NO: 627 - RNA, 20 nt, synthetic construct
  misc_feature 1..20: note = Synthetic Polynucleotide
  source 1..20: mol_type = other RNA
attttccagcaagaggctcc

SEQ ID NO: 628 - RNA, 20 nt, synthetic construct
  misc_feature 1..20: note = Synthetic Polynucleotide
  source 1..20: mol_type = other RNA
aaactgttttatacatcaat

SEQ ID NO: 629 - RNA, 20 nt, synthetic construct
  misc_feature 1..20: note = Synthetic Polynucleotide
  source 1..20: mol_type = other RNA
cgacaccgaagcagagtttt

SEQ ID NO: 630 - RNA, 20 nt, synthetic construct
  misc_feature 1..20: note = Synthetic Polynucleotide
  source 1..20: mol_type = other RNA
ccttccaggaattctttggc

SEQ ID NO: 631 - RNA, 20 nt, synthetic construct
  misc_feature 1..20: note = Synthetic Polynucleotide
  source 1..20: mol_type = other RNA
caccccaaaggtgaccgtcc

SEQ ID NO: 632 - RNA, 20 nt, synthetic construct
  misc_feature 1..20: note = Synthetic Polynucleotide
  source 1..20: mol_type = other RNA
cgacaccgaagcagagtttt

SEQ ID NO: 633 - RNA, 20 nt, synthetic construct
  misc_feature 1..20: note = Synthetic Polynucleotide
  source 1..20: mol_type = other RNA
cccatcatctatgcctttgt

SEQ ID NO: 634 - RNA, 20 nt, synthetic construct
  misc_feature 1..20: note = Synthetic Polynucleotide
  source 1..20: mol_type = other RNA
gacaccgaagcagagttttt

SEQ ID NO: 635 - RNA, 20 nt, synthetic construct
  misc_feature 1..20: note = Synthetic Polynucleotide
  source 1..20: mol_type = other RNA
aacaccttccaggaattctt

SEQ ID NO: 636 - RNA, 20 nt, synthetic construct
  misc_feature 1..20: note = Synthetic Polynucleotide
  source 1..20: mol_type = other RNA
catacagtcagtatcaattc

SEQ ID NO: 637 - RNA, 20 nt, synthetic construct
  misc_feature 1..20: note = Synthetic Polynucleotide
  source 1..20: mol_type = other RNA
gcagcagtgcgtcatcccaa

SEQ ID NO: 638 - RNA, 20 nt, synthetic construct
  misc_feature 1..20: note = Synthetic Polynucleotide
  source 1..20: mol_type = other RNA
aaaaccaaagatgaacacca

SEQ ID NO: 639 - RNA, 20 nt, synthetic construct
  misc_feature 1..20: note = Synthetic Polynucleotide
  source 1..20: mol_type = other RNA
gtaaagatgattcctgggag

SEQ ID NO: 640 - RNA, 20 nt, synthetic construct
  misc_feature 1..20: note = Synthetic Polynucleotide
  source 1..20: mol_type = other RNA
catgttgcccacaaaaccaa

SEQ ID NO: 641 - RNA, 20 nt, synthetic construct
  misc_feature 1..20: note = Synthetic Polynucleotide
  source 1..20: mol_type = other RNA
taggattcccgagtagcaga

SEQ ID NO: 642 - RNA, 20 nt, synthetic construct
  misc_feature 1..20: note = Synthetic Polynucleotide
  source 1..20: mol_type = other RNA
atgcagcagtgcgtcatccc

SEQ ID NO: 643 - RNA, 20 nt, synthetic construct
  misc_feature 1..20: note = Synthetic Polynucleotide
  source 1..20: mol_type = other RNA
acttgtcaccaccccaaagg

SEQ ID NO: 644 - RNA, 20 nt, synthetic construct
  misc_feature 1..20: note = Synthetic Polynucleotide
  source 1..20: mol_type = other RNA
cacacttgtcaccaccccaa

SEQ ID NO: 645 - RNA, 20 nt, synthetic construct
  misc_feature 1..20: note = Synthetic Polynucleotide
  source 1..20: mol_type = other RNA
atgcagcagtgcgtcatccc

SEQ ID NO: 646 - RNA, 20 nt, synthetic construct
  misc_feature 1..20: note = Synthetic Polynucleotide
  source 1..20: mol_type = other RNA
gttgcccacaaaaccaaaga

SEQ ID NO: 647 - RNA, 20 nt, synthetic construct
  misc_feature 1..20: note = Synthetic Polynucleotide
  source 1..20: mol_type = other RNA
cctgcctccgctctactcac

SEQ ID NO: 648 - RNA, 20 nt, synthetic construct
  misc_feature 1..20: note = Synthetic Polynucleotide
  source 1..20: mol_type = other RNA
tcccgagtagcagatgacca

SEQ ID NO: 649 - RNA, 20 nt, synthetic construct
  misc_feature 1..20: note = Synthetic Polynucleotide
  source 1..20: mol_type = other RNA
tgcagcagtgcgtcatccca

SEQ ID NO: 650 - RNA, 20 nt, synthetic construct
  misc_feature 1..20: note = Synthetic Polynucleotide
  source 1..20: mol_type = other RNA
atgcaggtgacagagactct

SEQ ID NO: 651 - RNA, 20 nt, synthetic construct
  misc_feature 1..20: note = Synthetic Polynucleotide
  source 1..20: mol_type = other RNA
cttccaggaattctttggcc

SEQ ID NO: 652 - RNA, 20 nt, synthetic construct
  misc_feature 1..20: note = Synthetic Polynucleotide
  source 1..20: mol_type = other RNA
cgacaccgaagcagagtttt

SEQ ID NO: 653 - RNA, 20 nt, synthetic construct
  misc_feature 1..20: note = Synthetic Polynucleotide
  source 1..20: mol_type = other RNA
ccttccaggaattctttggc

SEQ ID NO: 654 - RNA, 20 nt, synthetic construct
  misc_feature 1..20: note = Synthetic Polynucleotide
  source 1..20: mol_type = other RNA
caccccaaaggtgaccgtcc

SEQ ID NO: 655 - RNA, 20 nt, synthetic construct
  misc_feature 1..20: note = Synthetic Polynucleotide
  source 1..20: mol_type = other RNA
cgacaccgaagcagagtttt

SEQ ID NO: 656 - RNA, 20 nt, synthetic construct
  misc_feature 1..20: note = Synthetic Polynucleotide
  source 1..20: mol_type = other RNA
cccatcatctatgcctttgt

SEQ ID NO: 657 - RNA, 20 nt, synthetic construct
  misc_feature 1..20: note = Synthetic Polynucleotide
  source 1..20: mol_type = other RNA
aacaccttccaggaattctt

SEQ ID NO: 658 - RNA, 20 nt, synthetic construct
  misc_feature 1..20: note = Synthetic Polynucleotide
  source 1..20: mol_type = other RNA
gcagcaggagcacccaagag

SEQ ID NO: 659 - RNA, 24 nt, synthetic construct
  misc_feature 1..24: note = Synthetic Polynucleotide
  source 1..24: mol_type = other RNA
aaaaccaaagagaacaccagcgag

SEQ ID NO: 660 - RNA, 19 nt, synthetic construct
  misc_feature 1..19: note = Synthetic Polynucleotide
  source 1..19: mol_type = other RNA
gaaagagaccgggacagac

SEQ ID NO: 661 - RNA, 20 nt, synthetic construct
  misc_feature 1..20: note = Synthetic Polynucleotide
  source 1..20: mol_type = other RNA
caggcccacaaaaccaaaga

SEQ ID NO: 662 - RNA, 20 nt, synthetic construct
  misc_feature 1..20: note = Synthetic Polynucleotide
  source 1..20: mol_type = other RNA
caggacccgagagcagagac

SEQ ID NO: 663 - RNA, 21 nt, synthetic construct
  misc_feature 1..21: note = Synthetic Polynucleotide
  source 1..21: mol_type = other RNA
agcagcaggagcacccaagag

SEQ ID NO: 664 - RNA, 20 nt, synthetic construct
  misc_feature 1..20: note = Synthetic Polynucleotide
  source 1..20: mol_type = other RNA
acgcaccaccccaaagggac

SEQ ID NO: 665 - RNA, 20 nt, synthetic construct
  misc_feature 1..20: note = Synthetic Polynucleotide
  source 1..20: mol_type = other RNA
cacacgcaccaccccaaagg

SEQ ID NO: 666 - RNA, 19 nt, synthetic construct
  misc_feature 1..19: note = Synthetic Polynucleotide
  source 1..19: mol_type = other RNA
agcagcaggagcacccaag

SEQ ID NO: 667 - RNA, 21 nt, synthetic construct
  misc_feature 1..21: note = Synthetic Polynucleotide
  source 1..21: mol_type = other RNA
ggcccacaaaaccaaagagaa

SEQ ID NO: 668 - RNA, 17 nt, synthetic construct
  misc_feature 1..17: note = Synthetic Polynucleotide
  source 1..17: mol_type = other RNA
ccgccccgccaccgcgg

SEQ ID NO: 669 - RNA, 20 nt, synthetic construct
  misc_feature 1..20: note = Synthetic Polynucleotide
  source 1..20: mol_type = other RNA
cccgagagcagagaccagac

SEQ ID NO: 670 - RNA, 20 nt, synthetic construct
  misc_feature 1..20: note = Synthetic Polynucleotide
  source 1..20: mol_type = other RNA
gcagcaggagcacccaagag

SEQ ID NO: 671 - RNA, 21 nt, synthetic construct
  misc_feature 1..21: note = Synthetic Polynucleotide
  source 1..21: mol_type = other RNA
acgcagggacagagaccggga

SEQ ID NO: 672 - RNA, 17 nt, synthetic construct
  misc_feature 1..17: note = Synthetic Polynucleotide
  source 1..17: mol_type = other RNA
cccaggaaccggccgaa

SEQ ID NO: 673 - RNA, 21 nt, synthetic construct
  misc_feature 1..21: note = Synthetic Polynucleotide
  source 1..21: mol_type = other RNA
cgacaccgaagcagggcagga

SEQ ID NO: 674 - RNA, 18 nt, synthetic construct
  misc_feature 1..18: note = Synthetic Polynucleotide
  source 1..18: mol_type = other RNA
ccccaggaaccggccgag

SEQ ID NO: 675 - RNA, 20 nt, synthetic construct
  misc_feature 1..20: note = Synthetic Polynucleotide
  source 1..20: mol_type = other RNA
caccccaaagggaccgccgg

SEQ ID NO: 676 - RNA, 19 nt, synthetic construct
  misc_feature 1..19: note = Synthetic Polynucleotide
  source 1..19: mol_type = other RNA
cgacaccgaagcagggcag

SEQ ID NO: 677 - RNA, 15 nt, synthetic construct
  misc_feature 1..15: note = Synthetic Polynucleotide
  source 1..15: mol_type = other RNA
cccacacagcccggg

SEQ ID NO: 678 - RNA, 17 nt, synthetic construct
  misc_feature 1..17: note = Synthetic Polynucleotide
  source 1..17: mol_type = other RNA
aacaccccaggaaccgg

SEQ ID NO: 679 - DNA, 4104 bp, Streptococcus pyogenes
  source 1..4104: mol_type = genomic DNA
atggataagaaatactcaataggcttagatatcggcacaaatagcgtcggatgggcggtgatcactgatgattataaggttccgtctaaaaagttcaaggttctgggaaatacagaccgccacagtatcaaaaaaaatcttataggggctcttttatttggcagtggagagacagcggaagcgactcgtctcaaacggacagctcgtagaaggtatacacgtcggaagaatcgtatttgttatctacaggagattttttcaaatgagatggcgaaagtagatgatagtttctttcatcgacttgaagagtcttttttggtggaagaagacaagaagcatgaacgtcatcctatttttggaaatatagtagatgaagttgcttatcatgagaaatatccaactatctatcatctgcgaaaaaaattggcagattctactgataaagcggatttgcgcttaatctatttggccttagcgcatatgattaagtttcgtggtcattttttgattgagggagatttaaatcctgataatagtgatgtggacaaactatttatccagttggtacaaatctacaatcaattatttgaagaaaaccctattaacgcaagtagagtagatgctaaagcgattctttctgcacgattgagtaaatcaagacgattagaaaatctcattgctcagctccccggtgagaagagaaatggcttgtttgggaatctcattgctttgtcattgggattgacccctaattttaaatcaaattttgatttggcagaagatgctaaattacagctttcaaaagatacttacgatgatgatttagataatttattggcgcaaattggagatcaatatgctgatttgtttttggcagctaagaatttatcagatgctattttactttcagatatcctaagagtaaatagtgaaataactaaggctcccctatcagcttcaatgattaagcgctacgatgaacatcatcaagacttgactcttttaaaagctttagttcgacaacaacttccagaaaagtataaagaaatcttttttgatcaatcaaaaaacggatatgcaggttatattgatgggggagctagccaagaagaattttataaatttatcaaaccaattttagaaaaaatggatggtactgaggaattattggtgaaactaaatcgtgaagatttgctgcgcaagcaacggacctttgacaacggctctattccccatcaaattcacttgggtgagctgcatgctattttgagaagacaagaagacttttatccatttttaaaagacaatcgtgagaagattgaaaaaatcttgacttttcgaattccttattatgttggtccattggcgcgtggcaatagtcgttttgcatggatgactcggaagtctgaagaaacaattaccccatggaattttgaagaagttgtcgataaaggtgcttcagctcaatcatttattgaacgcatgacaaactttgataaaaatcttccaaatgaaaaagtactaccaaaacatagtttgctttatgagtattttacggtttataacgaattgacaaaggtcaaatatgttactgagggaatgcgaaaaccagcatttctttcaggtgaacagaagaaagccattgttgatttactcttcaaaacaaatcgaaaagtaaccgttaagcaattaaaagaagattatttcaaaaaaatagaatgttttgatagtgttgaaatttcaggagttgaagatagatttaatgcttcattaggcgcctaccatgatttgctaaaaattattaaagataaagattttttggataatgaagaaaatgaagatatcttagaggatattgttttaacattgaccttatttgaagatagggggatgattgaggaaagacttaaaacatatgctcacctctttgatgataaggtgatgaaacagcttaaacgtcgccgttatactggttggggacgtttgtctcgaaaattgattaatggtattagggataagcaatctggcaaaacaatattagattttttgaaatcagatggttttgccaatcgcaattttatgcagctgatccatgatgatagtttgacatttaaagaagatattcaaaaagcacaggtgtctggacaaggccatagtttacatgaacagattgctaacttagctggcagtcctgctattaaaaaaggtattttacagactgtaaaaattgttgatgaactggtcaaagtaatggggcataagccagaaaatatcgttattgaaatggcacgtgaaaatcagacaactcaaaagggccagaaaaattcgcgagagcgtatgaaacgaatcgaagaaggtatcaaagaattaggaagtcagattcttaaagagcatcctgttgaaaatactcaattgcaaaatgaaaagctctatctctattatctacaaaatggaagagacatgtatgtggaccaagaattagatattaatcgtttaagtgattatgatgtcgatcacattgttccacaaagtttcattaaagacgattcaatagacaataaggtactaacgcgttctgataaaaatcgtggtaaatcggataacgttccaagtgaagaagtagtcaaaaagatgaaaaactattggagacaacttctaaacgccaagttaatcactcaacgtaagtttgataatttaacgaaagctgaacgtggaggtttgagtgaacttgataaagctggttttatcaaacgccaattggttgaaactcgccaaatcactaagcatgtggcacaaattttggatagtcgcatgaatactaaatacgatgaaaatgataaacttattcgagaggttaaagtgattaccttaaaatctaaattagtttctgacttccgaaaagatttccaattctataaagtacgtgagattaacaattaccatcatgcccatgatgcgtatctaaatgccgtcgttggaactgctttgattaagaaatatccaaaacttgaatcggagtttgtctatggtgattataaagtttatgatgttcgtaaaatgattgctaagtctgagcaagaaataggcaaagcaaccgcaaaatatttcttttactctaatatcatgaacttcttcaaaacagaaattacacttgcaaatggagagattcgcaaacgccctctaatcgaaactaatggggaaactggagaaattgtctgggataaagggcgagattttgccacagtgcgcaaagtattgtccatgccccaagtcaatattgtcaagaaaacagaagtacagacaggcggattctccaaggagtcaattttaccaaaaagaaattcggacaagcttattgctcgtaaaaaagactgggatccaaaaaaatatggtggttttgatagtccaacggtagcttattcagtcctagtggttgctaaggtggaaaaagggaaatcgaagaagttaaaatccgttaaagagttactagggatcacaattatggaaagaagttcctttgaaaaaaatccgattgactttttagaagctaaaggatataaggaagttaaaaaagacttaatcattaaactacctaaatatagtctttttgagttagaaaacggtcgtaaacggatgctggctagtgccggagaattacaaaaaggaaatgagctggctctgccaagcaaatatgtgaattttttatatttagctagtcattatgaaaagttgaagggtagtccagaagataacgaacaaaaacaattgtttgtggagcagcataagcattatttagatgagattattgagcaaatcagtgaattttctaagcgtgttattttagcagatgccaatttagataaagttcttagtgcatataacaaacatagagacaaaccaatacgtgaacaagcagaaaatattattcatttatttacgttgacgaatcttggagctcccgctgcttttaaatattttgatacaacaattgatcgtaaacgatatacgtctacaaaagaagttttagatgccactcttatccatcaatccatcactggtctttatgaaacacgcattgatttgagtcagctaggaggtgactga

SEQ ID NO: 680 - protein, 1367 aa, Streptococcus pyogenes
MDKKYSIGLDIGTNSVGWAVITDDYKVPSKKFKVLGNTDRHSIKKNLIGALLFGSGETAEATRLKRTARRRYTRRKNRICYLQEIFSNEMAKVDDSFFHRLEESFLVEEDKKHERHPIFGNIVDEVAYHEKYPTIYHLRKKLADSTDKADLRLIYLALAHMIKFRGHFLIEGDLNPDNSDVDKLFIQLVQIYNQLFEENPINASRVDAKAILSARLSKSRRLENLIAQLPGEKRNGLFGNLIALSLGLTPNFKSNFDLAEDAKLQLSKDTYDDDLDNLLAQIGDQYADLFLAAKNLSDAILLSDILRVNSEITKAPLSASMIKRYDEHHQDLTLLKALVRQQLPEKYKEIFFDQSKNGYAGYIDGGASQEEFYKFIKPILEKMDGTEELLVKLNREDLLRKQRTFDNGSIPHQIHLGELHAILRRQEDFYPFLKDNREKIEKILTFRIPYYVGPLARGNSRFAWMTRKSEETITPWNFEEVVDKGASAQSFIERMTNFDKNLPNEKVLPKHSLLYEYFTVYNELTKVKYVTEGMRKPAFLSGEQKKAIVDLLFKTNRKVTVKQLKEDYFKKIECFDSVEISGVEDRFNASLGAYHDLLKIIKDKDFLDNEENEDILEDIVLTLTLFEDRGMIEERLKTYAHLFDDKVMKQLKRRRYTGWGRLSRKLINGIRDKQSGKTILDFLKSDGFANRNFMQLIHDDSLTFKEDIQKAQVSGQGHSLHEQIANLAGSPAIKKGILQTVKIVDELVKVMGHKPENIVIEMARENQTTQKGQKNSRERMKRIEEGIKELGSQILKEHPVENTQLQNEKLYLYYLQNGRDMYVDQELDINRLSDYDVDHIVPQSFIKDDSIDNKVLTRSDKNRGKSDNVPSEEVVKKMKNYWRQLLNAKLITQRKFDNLTKAERGGLSELDKAGFIKRQLVETRQITKHVAQILDSRMNTKYDENDKLIREVKVITLKSKLVSDFRKDFQFYKVREINNYHHAHDAYLNAVVGTALIKKYPKLESEFVYGDYKVYDVRKMIAKSEQEIGKATAKYFFYSNIMNFFKTEITLANGEIRKRPLIETNGETGEIVWDKGRDFATVRKVLSMPQVNIVKKTEVQTGGFSKESILPKRNSDKLIARKKDWDPKKYGGFDSPTVAYSVLVVAKVEKGKSKKLKSVKELLGITIMERSSFEKNPIDFLEAKGYKEVKKDLIIKLPKYSLFELENGRKRMLASAGELQKGNELALPSKYVNFLYLASHYEKLKGSPEDNEQKQLFVEQHKHYLDEIIEQISEFSKRVILADANLDKVLSAYNKHRDKPIREQAENIIHLFTLTNLGAPAAFKYFDTTIDRKRYTSTKEVLDATLIHQSITGLYETRIDLSQLGGD

SEQ ID NO: 681 - DNA, 4212 bp, Streptococcus pyogenes
  source 1..4212: mol_type = genomic DNA
atggataaaaagtattctattggtttagacatcggcactaattccgttggatgggctgtcataaccgatgaatacaaagtaccttcaaagaaatttaaggtgttggggaacacagaccgtcattcgattaaaaagaatcttatcggtgccctcctattcgatagtggcgaaacggcagaggcgactcgcctgaaacgaaccgctcggagaaggtatacacgtcgcaagaaccgaatatgttacttacaagaaatttttagcaatgagatggccaaagttgacgattctttctttcaccgtttggaagagtccttccttgtcgaagaggacaagaaacatgaacggcaccccatctttggaaacatagtagatgaggtggcatatcatgaaaagtacccaacgatttatcacctcagaaaaaagctagttgactcaactgataaagcggacctgaggttaatctacttggctcttgcccatatgataaagttccgtgggcactttctcattgagggtgatctaaatccggacaactcggatgtcgacaaactgttcatccagttagtacaaacctataatcagttgtttgaagagaaccctataaatgcaagtggcgtggatgcgaaggctattcttagcgcccgcctctctaaatcccgacggctagaaaacctgatcgcacaattacccggagagaagaaaaatgggttgttcggtaaccttatagcgctctcactaggcctgacaccaaattttaagtcgaacttcgacttagctgaagatgccaaattgcagcttagtaaggacacgtacgatgacgatctcgacaatctactggcacaaattggagatcagtatgcggacttatttttggctgccaaaaaccttagcgatgcaatcctcctatctgacatactgagagttaatactgagattaccaaggcgccgttatccgcttcaatgatcaaaaggtacgatgaacatcaccaagacttgacacttctcaaggccctagtccgtcagcaactgcctgagaaatataaggaaatattctttgatcagtcgaaaaacgggtacgcaggttatattgacggcggagcgagtcaagaggaattctacaagtttatcaaacccatattagagaagatggatgggacggaagagttgcttgtaaaactcaatcgcgaagatctactgcgaaagcagcggactttcgacaacggtagcattccacatcaaatccacttaggcgaattgcatgctatacttagaaggcaggaggatttttatccgttcctcaaagacaatcgtgaaaagattgagaaaatcctaacctttcgcataccttactatgtgggacccctggcccgagggaactctcggttcgcatggatgacaagaaagtccgaagaaacgattactccatggaattttgaggaagttgtcgataaaggtgcgtcagctcaatcgttcatcgagaggatgaccaactttgacaagaatttaccgaacgaaaaagtattgcctaagcacagtttactttacgagtatttcacagtgtacaatgaactcacgaaagttaagtatgtcactgagggcatgcgtaaacccgcctttctaagcggagaacagaagaaagcaatagtagatctgttattcaagaccaaccgcaaagtgacagttaagcaattgaaagaggactactttaagaaaattgaatgcttcgattctgtcgagatctccggggtagaagatcgatttaatgcgtcacttggtacgtatcatgacctcctaaagataattaaagataaggacttcctggataacgaagagaatgaagatatcttagaagatatagtgttgactcttaccctctttgaagatcgggaaatgattgaggaaagactaaaaacatacgctcacctgttcgacgataaggttatgaaacagttaaagaggcgtcgctatacgggctggggacgattgtcgcggaaacttatcaacgggataagagacaagcaaagtggtaaaactattctcgattttctaaagagcgacggcttcgccaataggaactttatgcagctgatccatgatgactctttaaccttcaaagaggatatacaaaaggcacaggtttccggacaaggggactcattgcacgaacatattgcgaatcttgctggttcgccagccatcaaaaagggcatactccagacagtcaaagtagtggatgagctagttaaggtcatgggacgtcacaaaccggaaaacattgtaatcgagatggcacgcgaaaatcaaacgactcagaaggggcaaaaaaacagtcgagagcggatgaagagaatagaagagggtattaaagaactgggcagccagatcttaaaggagcatcctgtggaaaatacccaattgcagaacgagaaactttacctctattacctacaaaatggaagggacatgtatgttgatcaggaactggacataaaccgtttatctgattacgacgtcgatcacattgtaccccaatcctttttgaaggacgattcaatcgacaataaagtgcttacacgctcggataagaaccgagggaaaagtgacaatgttccaagcgaggaagtcgtaaagaaaatgaagaactattggcggcagctcctaaatgcgaaactgataacgcaaagaaagttcgataacttaactaaagctgagaggggtggcttgtctgaacttgacaaggccggatttattaaacgtcagctcgtggaaacccgccaaatcacaaagcatgttgcacagatactagattcccgaatgaatacgaaatacgacgagaacgataagctgattcgggaagtcaaagtaatcactttaaagtcaaaattggtgtcggacttcagaaaggattttcaattctataaagttagggagataaataactaccaccatgcgcacgacgcttatcttaatgccgtcgtagggaccgcactcattaagaaatacccgaagctagaaagtgagtttgtgtatggtgattacaaagtttatgacgtccgtaagatgatcgcgaaaagcgaacaggagataggcaaggctacagccaaatacttcttttattctaacattatgaatttctttaagacggaaatcactctggcaaacggagagatacgcaaacgacctttaattgaaaccaatggggagacaggtgaaatcgtatgggataagggccgggacttcgcgacggtgagaaaagttttgtccatgccccaagtcaacatagtaaagaaaactgaggtgcagaccggagggttttcaaaggaatcgattcttccaaaaaggaatagtgataagctcatcgctcgtaaaaaggactgggacccgaaaaagtacggtggcttcgatagccctacagttgcctattctgtcctagtagtggcaaaagttgagaagggaaaatccaagaaactgaagtcagtcaaagaattattggggataacgattatggagcgctcgtcttttgaaaagaaccccatcgacttccttgaggcgaaaggttacaaggaagtaaaaaaggatctcataattaaactaccaaagtatagtctgtttgagttagaaaatggccgaaaacggatgttggctagcgccggagagcttcaaaaggggaacgaactcgcactaccgtctaaatacgtgaatttcctgtatttagcgtcccattacgagaagttgaaaggttcacctgaagataacgaacagaagcaactttttgttgagcagcacaaacattatctcgacgaaatcatagagcaaatttcggaattcagtaagagagtcatcctagctgatgccaatctggacaaagtattaagcgcatacaacaagcacagggataaacccatacgtgagcaggcggaaaatattatccatttgtttactcttaccaacctcggcgctccagccgcattcaagtattttgacacaacgatagatcgcaaacgatacacttctaccaaggaggtgctagacgcgacactgattcaccaatccatcacgggattatatgaaactcggatagatttgtcacagcttgggggtgacggatcccccaagaagaagaggaaagtctcgagcgactacaaagaccatgacggtgattataaagatcatgacatcgattacaaggatgacgatgacaaggctgcagga

SEQ ID NO: 682 - protein, 1368 aa, Streptococcus pyogenes; identical to SEQ ID NO: 3

SEQ ID NO: 683 - protein, 1368 aa, synthetic construct; identical to SEQ ID NO: 3
  REGION 1..1368: note = Synthetic Polypeptide

SEQ ID NO: 684 - protein, 1307 aa, Staphylococcus aureus
TQFEGFTNLYQVSKTLRFELIPQGKTLKHIQEQGFIEEDKARNDHYKELKPIIDRIYKTYADQCLQLVQLDWENLSAAIDSYRKEKTEETRNALIEEQATYRNAIHDYFIGRTDNLTDAINKRHAEIYKGLFKAELFNGKVLKQLGTVTTTEHENALLRSFDKFTTYFSGFYENRKNVFSAEDISTAIPHRIVQDNFPKFKENCHIFTRLITAVPSLREHFENVKKAIGIFVSTSIEEVFSFPFYNQLLTQTQIDLYNQLLGGISREAGTEKIKGLNEVLNLAIQKNDETAHIIASLPHRFIPLFKQILSDRNTLSFILEEFKSDEEVIQSFCKYKTLLRNENVLETAEALFNELNSIDLTHIFISHKKLETISSALCDHWDTLRNALYERRISELTGKITKSAKEKVQRSLKHEDINLQEIISAAGKELSEAFKQKTSEILSHAHAALDQPLPTTMLKKQEEKEILKSQLDSLLGLYHLLDWFAVDESNEVDPEFSARLTGIKLEMEPSLSFYNKARNYATKKPYSVEKFKLNFQMPTLASGWDVNKEKNNGAILFVKNGLYYLGIMPKQKGRYKALSFEPTEKTSEGFDKMYYDYFPDAAKMIPKCSTQLKAVTAHFQTHTTPILLSNNFIEPLEITKEIYDLNNPEKEPKKFQTAYAKKTGDQKGYREALCKWIDFTRDFLSKYTKTTSIDLSSLRPSSQYKDLGEYYAELNPLLYHISFQRIAEKEIMDAVETGKLYLFQIYNKDFAKGHHGKPNLHTLYWTGLFSPENLAKTSIKLNGQAELFYRPKSRMKRMAHRLGEKMLNKKLKDQKTPIPDTLYQELYDYVNHRLSHDLSDEARALLPNVITKEVSHEIIKDRRFTSDKFFFHVPITLNYQAANSPSKFNQRVNAYLKEHPETPIIGIDRGERNLIYITVIDSTGKILEQRSLNTIQQFDYQKKLDNREKERVAARQAWSVVGTIKDLKQGYLSQVIHEIVDLMIHYQAVVVLENLNFGFKSKRTGIAEKAVYQQFEKMLIDKLNCLVLKDYPAEKVGGVLNPYQLTDQFTSFAKMGTQSGFLFYVPAPYTSKIDPLTGFVDPFVWKTIKNHESRKHFLEGFDFLHYDVKTGDFILHFKMNRNLSFQRGLPGFMPAWDIVFEKNETQFDAKGTPFIAGKRIVPVIENHRFTGRYRDLYPANELIALLEEKGIVFRDGSNILPKLLENDDSHAIDTMVALIRSVLQMRNSNAATGEDYINSPVRDLNGVCFDSRFQNPEWPMDADANGAYHIALKGQLLLNHLKESKDLKLQNGISNQDWLAYIQELRN

SEQ ID NO: 685 - protein, 1228 aa, Staphylococcus aureus
MSKLEKFTNCYSLSKTLRFKAIPVGKTQENIDNKRLLVEDEKRAEDYKGVKKLLDRYYLSFINDVLHSIKLKNLNNYISLFRKKTRTEKENKELENLEINLRKEIAKAFKGNEGYKSLFKKDIIETILPEFLDDKDEIALVNSFNGFTTAFTGFFDNRENMFSEEAKSTSIAFRCINENLTRYISNMDIFEKVDAIFDKHEVQEIKEKILNSDYDVEDFFEGEFFNFVLTQEGIDVYNAIIGGFVTESGEKIKGLNEYINLYNQKTKQKLPKFKPLYKQVLSDRESLSFYGEGYTSDEEVLEVFRNTLNKNSEIFSSIKKLEKLFKNFDEYSSAGIFVKNGPAISTISKDIFGEWNVIRDKWNAEYDDIHLKKKAVVTEKYEDDRRKSFKKIGSFSLEQLQEYADADLSVVEKLKEIIIQKVDEIYKVYGSSEKLFDADFVLEKSLKKNDAVVAIMKDLLDSVKSFENYIKAFFGEGKETNRDESFYGDFVLAYDILLKVDHIYDAIRNYVTQKPYSKDKFKLYFQNPQFMGGWDKDKETDYRATILRYGSKYYLAIMDKKYAKCLQKIDKDDVNGNYEKINYKLLPGPNKMLPKVFFSKKWMAYYNPSEDIQKIYKNGTFKKGDMFNLNDCHKLIDFFKDSISRYPKWSNAYDFNFSETEKYKDIAGFYREVEEQGYKVSFESASKKEVDKLVEEGKLYMFQIYNKDFSDKSHGTPNLHTMYFKLLFDENNHGQIRLSGGAELFMRRASLKKEELVVHPANSPIANKNPDNPKKTTTLSYDVYKDKRFSEDQYELHIPIAINKCPKNIFKINTEVRVLLKHDDNPYVIGIDRGERNLLYIVVVDGKGNIVEQYSLNEIINNFNGIRIKTDYHSLLDKKEKERFEARQNWTSIENIKELKAGYISQVVHKICELVEKYDAVIALEDLNSGFKNSRVKVEKQVYQKFEKMLIDKLNYMVDKKSNPCATGGALKGYQITNKFESFKSMSTQNGFIFYIPAWLTSKIDPSTGFVNLLKTKYTSIADSKKFISSFDRIMYVPEEDLFEFALDYKNFSRTDADYIKKWKLYSYGNRIRIFRNPKKNNVFDWEEVCLTSAYKELFNKYGINYQQGDIRALLCEQSDKAFYSSFMALMSLMLQMRNSITGRTDVDFLISPVKNSDGIFYDSRNYEAQENAILPKNADANGAYNIARKVLWAIGQFKKAEDEKLDKVKIAISNKEWLEYAQTSVKH

SEQ ID NO: 686 - protein, 1307 aa, synthetic construct
  REGION 1..1307: note = Synthetic Polypeptide
TQFEGFTNLYQVSKTLRFELIPQGKTLKHIQEQGFIEEDKARNDHYKELKPIIDRIYKTYADQCLQLVQLDWENLSAAIDSYRKEKTEETRNALIEEQATYRNAIHDYFIGRTDNLTDAINKRHAEIYKGLFKAELFNGKVLKQLGTVTTTEHENALLRSFDKFTTYFSGFYENRKNVFSAEDISTAIPHRIVQDNFPKFKENCHIFTRLITAVPSLREHFENVKKAIGIFVSTSIEEVFSFPFYNQLLTQTQIDLYNQLLGGISREAGTEKIKGLNEVLNLAIQKNDETAHIIASLPHRFIPLFKQILSDRNTLSFILEEFKSDEEVIQSFCKYKTLLRNENVLETAEALFNELNSIDLTHIFISHKKLETISSALCDHWDTLRNALYERRISELTGKITKSAKEKVQRSLKHEDINLQEIISAAGKELSEAFKQKTSEILSHAHAALDQPLPTTMLKKQEEKEILKSQLDSLLGLYHLLDWFAVDESNEVDPEFSARLTGIKLEMEPSLSFYNKARNYATKKPYSVEKFKLNFQMPTLASGWDVNKEKNNGAILFVKNGLYYLGIMPKQKGRYKALSFEPTEKTSEGFDKMYYDYFPDAAKMIPKCSTQLKAVTAHFQTHTTPILLSNNFIEPLEITKEIYDLNNPEKEPKKFQTAYAKKTGDQKGYREALCKWIDFTRDFLSKYTKTTSIDLSSLRPSSQYKDLGEYYAELNPLLYHISFQRIAEKEIMDAVETGKLYLFQIYNKDFAKGHHGKPNLHTLYWTGLFSPENLAKTSIKLNGQAELFYRPKSRMKRMAHRLGEKMLNKKLKDQKTPIPDTLYQELYDYVNHRLSHDLSDEARALLPNVITKEVSHEIIKDRRFTSDKFFFHVPITLNYQAANSPSKFNQRVNAYLKEHPETPIIGIDRGEANLIYITVIDSTGKILEQRSLNTIQQFDYQKKLDNREKERVAARQAWSVVGTIKDLKQGYLSQVIHEIVDLMIHYQAVVVLENLNFGFKSKRTGIAEKAVYQQFEKMLIDKLNCLVLKDYPAEKVGGVLNPYQLTDQFTSFAKMGTQSGFLFYVPAPYTSKIDPLTGFVDPFVWKTIKNHESRKHFLEGFDFLHYDVKTGDFILHFKMNRNLSFQRGLPGFMPAWDIVFEKNETQFDAKGTPFIAGKRIVPVIENHRFTGRYRDLYPANELIALLEEKGIVFRDGSNILPKLLENDDSHAIDTMVALIRSVLQMRNSNAATGEDYINSPVRDLNGVCFDSRFQNPEWPMDADANGAYHIALKGQLLLNHLKESKDLKLQNGISNQDWLAYIQELRN

SEQ ID NO: 687 - protein, 1228 aa, synthetic construct
  REGION 1..1228: note = Synthetic Polypeptide
MSKLEKFTNCYSLSKTLRFKAIPVGKTQENIDNKRLLVEDEKRAEDYKGVKKLLDRYYLSFINDVLHSIKLKNLNNYISLFRKKTRTEKENKELENLEINLRKEIAKAFKGNEGYKSLFKKDIIETILPEFLDDKDEIALVNSFNGFTTAFTGFFDNRENMFSEEAKSTSIAFRCINENLTRYISNMDIFEKVDAIFDKHEVQEIKEKILNSDYDVEDFFEGEFFNFVLTQEGIDVYNAIIGGFVTESGEKIKGLNEYINLYNQKTKQKLPKFKPLYKQVLSDRESLSFYGEGYTSDEEVLEVFRNTLNKNSEIFSSIKKLEKLFKNFDEYSSAGIFVKNGPAISTISKDIFGEWNVIRDKWNAEYDDIHLKKKAVVTEKYEDDRRKSFKKIGSFSLEQLQEYADADLSVVEKLKEIIIQKVDEIYKVYGSSEKLFDADFVLEKSLKKNDAVVAIMKDLLDSVKSFENYIKAFFGEGKETNRDESFYGDFVLAYDILLKVDHIYDAIRNYVTQKPYSKDKFKLYFQNPQFMGGWDKDKETDYRATILRYGSKYYLAIMDKKYAKCLQKIDKDDVNGNYEKINYKLLPGPNKMLPKVFFSKKWMAYYNPSEDIQKIYKNGTFKKGDMFNLNDCHKLIDFFKDSISRYPKWSNAYDFNFSETEKYKDIAGFYREVEEQGYKVSFESASKKEVDKLVEEGKLYMFQIYNKDFSDKSHGTPNLHTMYFKLLFDENNHGQIRLSGGAELFMRRASLKKEELVVHPANSPIANKNPDNPKKTTTLSYDVYKDKRFSEDQYELHIPIAINKCPKNIFKINTEVRVLLKHDDNPYVIGIDRGEANLLYIVVVDGKGNIVEQYSLNEIINNFNGIRIKTDYHSLLDKKEKERFEARQNWTSIENIKELKAGYISQVVHKICELVEKYDAVIALEDLNSGFKNSRVKVEKQVYQKFEKMLIDKLNYMVDKKSNPCATGGALKGYQITNKFESFKSMSTQNGFIFYIPAWLTSKIDPSTGFVNLLKTKYTSIADSKKFISSFDRIMYVPEEDLFEFALDYKNFSRTDADYIKKWKLYSYGNRIRIFRNPKKNNVFDWEEVCLTSAYKELFNKYGINYQQGDIRALLCEQSDKAFYSSFMALMSLMLQMRNSITGRTDVDFLISPVKNSDGIFYDSRNYEAQENAILPKNADANGAYNIARKVLWAIGQFKKAEDEKLDKVKIAISNKEWLEYAQTSVKH

SEQ ID NO: 688 - protein, 1228 aa, synthetic construct
  REGION 1..1228: note = Synthetic Polypeptide
MSKLEKFTNCYSLSKTLRFKAIPVGKTQENIDNKRLLVEDEKRAEDYKGVKKLLDRYYLSFINDVLHSIKLKNLNNYISLFRKKTRTEKENKELENLEINLRKEIAKAFKGNEGYKSLFKKDIIETILPEFLDDKDEIALVNSFNGFTTAFTGFFDNRENMFSEEAKSTSIAFRCINENLTRYISNMDIFEKVDAIFDKHEVQEIKEKILNSDYDVEDFFEGEFFNFVLTQEGIDVYNAIIGGFVTESGEKIKGLNEYINLYNQKTKQKLPKFKPLYKQVLSDRESLSFYGEGYTSDEEVLEVFRNTLNKNSEIFSSIKKLEKLFKNFDEYSSAGIFVKNGPAISTISKDIFGEWNVIRDKWNAEYDDIHLKKKAVVTEKYEDDRRKSFKKIGSFSLEQLQEYADADLSVVEKLKEIIIQKVDEIYKVYGSSEKLFDADFVLEKSLKKNDAVVAIMKDLLDSVKSFENYIKAFFGEGKETNRDESFYGDFVLAYDILLKVDHIYDAIRNYVTQKPYSKDKFKLYFQNPQFMGGWDKDKETDYRATILRYGSKYYLAIMDKKYAKCLQKIDKDDVNGNYEKINYKLLPGPNKMLPKVFFSKKWMAYYNPSEDIQKIYKNGTFKKGDMFNLNDCHKLIDFFKDSISRYPKWSNAYDFNFSETEKYKDIAGFYREVEEQGYKVSFESASKKEVDKLVEEGKLYMFQIYNKDFSDKSHGTPNLHTMYFKLLFDENNHGQIRLSGGAELFMRRASLKKEELVVHPANSPIANKNPDNPKKTTTLSYDVYKDKRFSEDQYELHIPIAINKCPKNIFKINTEVRVLLKHDDNPYVIGIDRGERNLLYIVVVDGKGNIVEQYSLNEIINNFNGIRIKTDYHSLLDKKEKERFEARQNWTSIENIKELKAGYISQVVHKICELVEKYDAVIALEDLNSGFKNSRVKVEKQVYQKFEKMLIDKLNYMVDKKSNPCATGGALKGYQITNKFESFKSMSTQNGFIFYIPAWLTSKIDPSTGFVNLLKTKYTSIADSKKFISSFDRIMYVPEEDLFEFALDYKNFSRTDADYIKKWKLYSYGNRIRIFRNPKKNNVFDWEEVCLTSAYKELFNKYGINYQQGDIRALLCEQSDKAFYSSFMALMSLMLQMANSITGRTDVDFLISPVKNSDGIFYDSRNYEAQENAILPKNADANGAYNIARKVLWAIGQFKKAEDEKLDKVKIAISNKEWLEYAQTSVKH

SEQ ID NO: 689 - protein, 1305 aa, synthetic construct
  REGION 1..1305: note = Synthetic Polypeptide
TQFEGFTNLYQVSKTLRFELIPQGKTLKHIQEQGFIEEDKARNDHYKELKPIIDRIYKTYADQCLQLVQLDWENLSAAIDSYRKEKTEETRNALIEEQATYRNAIHDYFIGRTDNLTDAINKRHAEIYKGLFKAELFNGKVLKQLGTVTTTEHENALLRSFDKFTTYFSGFYENRKNVFSAEDISTAIPHRIVQDNFPKFKENCHIFTRLITAVPSLREHFENVKKAIGIFVSTSIEEVFSFPFYNQLLTQTQIDLYNQLLGGISREAGTEKIKGLNEVLNLAIQKNDETAHIIASLPHRFIPLFKQILSDRNTLSFILEEFKSDEEVIQSFCKYKTLLRNENVLETAEALFNELNSIDLTHIFISHKKLETISSALCDHWDTLRNALYERRISELTGKITKSAKEKVQRSLKHEDINLQEIISAAGKELSEAFKQKTSEILSHAHAALDQPLPTTMLKKQEEKEILKSQLDSLLGLYHLLDWFAVDESNEVDPEFSARLTGIKLEMEPSLSFYNKARNYATKKPYSVEKFKLNFQMPTLASGWDVNKEKNNGAILFVKNGLYYLGIMPKQKGRYKALSFEPTEKTSEGFDKMYYDYFPDAAKMIPKCSTQLKAVTAHFQTHTTPILLSNNFIEPLEITKEIYDLNNPEKEPKKFQTAYAKKGQKGYREALCKWIDFTRDFLSKYTKTTSIDLSSLRPSSQYKDLGEYYAELNPLLYHISFQRIAEKEIMDAVETGKLYLFQIYNKDFAKGHHGKPNLHTLYWTGLFSPENLAKTSIKLNGQAELFYRPKSRMKRMAHRLGEKMLNKKLKDQKTPIPDTLYQELYDYVNHRLSHDLSDEARALLPNVITKEVSHEIIKDRRFTSDKFFFHVPITLNYQAANSPSKFNQRVNAYLKEHPETPIIGIDRGERNLIYITVIDSTGKILEQRSLNTIQQFDYQKKLDNREKERVAARQAWSVVGTIKDLKQGYLSQVIHEIVDLMIHYQAVVVLENLNFGFKSKRTGIAEKAVYQQFEKMLIDKLNCLVLKDYPAEKVGGVLNPYQLTDQFTSFAKMGTQSGFLFYVPAPYTSKIDPLTGFVDPFVWKTIKNHESRKHFLEGFDFLHYDVKTGDFILHFKMNRNLSFQRGLPGFMPAWDIVFEKNETQFDAKGTPFIAGKRIVPVIENHRFTGRYRDLYPANELIALLEEKGIVFRDGSNILPKLLENDDSHAIDTMVALIRSVLQMRNSNAATGEDYINSPVRDLNGVCFDSRFQNPEWPMDADANGAYHIALKGQLLLNHLKESKDLKLQNGISNQDWLAYIQELRN

SEQ ID NO: 690 - protein, 1303 aa, synthetic construct
  REGION 1..1303: note = Synthetic Polypeptide
TQFEGFTNLYQVSKTLRFELIPQGKTLKHIQEQGFIEEDKARNDHYKELKPIIDRIYKTYADQCLQLVQLDWENLSAAIDSYRKEKTEETRNALIEEQATYRNAIHDYFIGRTDNLTDAINKRHAEIYKGLFKAELFNGKVLKQLGTVTTTEHENALLRSFDKFTTYFSGFYENRKNVFSAEDISTAIPHRIVQDNFPKFKENCHIFTRLITAVPSLREHFENVKKAIGIFVSTSIEEVFSFPFYNQLLTQTQIDLYNQLLGGISREAGTEKIKGLNEVLNLAIQKNDETAHIIASLPHRFIPLFKQILSDRNTLSFILEEFKSDEEVIQSFCKYKTLLRNENVLETAEALFNELNSIDLTHIFISHKKLETISSALCDHWDTLRNALYERRISELTGKITKSAKEKVQRSLKHEDINLQEIISAAGKELSEAFKQKTSEILSHAHAALDQPLPTTMLKKQEEKEILKSQLDSLLGLYHLLDWFAVDESNEVDPEFSARLTGIKLEMEPSLSFYNKARNYATKKPYSVEKFKLNFQMPTLASGWDVNKEKNNGAILFVKNGLYYLGIMPKQKGRYKALSFEPTEKTSEGFDKMYYDYFPDAAKMIPKCSTQLKAVTAHFQTHTTPILLSNNFIEPLEITKEIYDLNNPEKEPKKFQTAYAKGKGYREALCKWIDFTRDFLSKYTKTTSIDLSSLRPSSQYKDLGEYYAELNPLLYHISFQRIAEKEIMDAVETGKLYLFQIYNKDFAKGHHGKPNLHTLYWTGLFSPENLAKTSIKLNGQAELFYRPKSRMKRMAHRLGEKMLNKKLKDQKTPIPDTLYQELYDYVNHRLSHDLSDEARALLPNVITKEVSHEIIKDRRFTSDKFFFHVPITLNYQAANSPSKFNQRVNAYLKEHPETPIIGIDRGERNLIYITVIDSTGKILEQRSLNTIQQFDYQKKLDNREKERVAARQAWSVVGTIKDLKQGYLSQVIHEIVDLMIHYQAVVVLENLNFGFKSKRTGIAEKAVYQQFEKMLIDKLNCLVLKDYPAEKVGGVLNPYQLTDQFTSFAKMGTQSGFLFYVPAPYTSKIDPLTGFVDPFVWKTIKNHESRKHFLEGFDFLHYDVKTGDFILHFKMNRNLSFQRGLPGFMPAWDIVFEKNETQFDAKGTPFIAGKRIVPVIENHRFTGRYRDLYPANELIALLEEKGIVFRDGSNILPKLLENDDSHAIDTMVALIRSVLQMRNSNAATGEDYINSPVRDLNGVCFDSRFQNPEWPMDADANGAYHIALKGQLLLNHLKESKDLKLQNGISNQDWLAYIQELRN

SEQ ID NO: 691 - protein, 1301 aa, synthetic construct
  REGION 1..1301: note = Synthetic Polypeptide
TQFEGFTNLYQVSKTLRFELIPQGKTLKHIQEQGFIEEDKARNDHYKELKPIIDRIYKTYADQCLQLVQLDWENLSAAIDSYRKEKTEETRNALIEEQATYRNAIHDYFIGRTDNLTDAINKRHAEIYKGLFKAELFNGKVLKQLGTVTTTEHENALLRSFDKFTTYFSGFYENRKNVFSAEDISTAIPHRIVQDNFPKFKENCHIFTRLITAVPSLREHFENVKKAIGIFVSTSIEEVFSFPFYNQLLTQTQIDLYNQLLGGISREAGTEKIKGLNEVLNLAIQKNDETAHIIASLPHRFIPLFKQILSDRNTLSFILEEFKSDEEVIQSFCKYKTLLRNENVLETAEALFNELNSIDLTHIFISHKKLETISSALCDHWDTLRNALYERRISELTGKITKSAKEKVQRSLKHEDINLQEIISAAGKELSEAFKQKTSEILSHAHAALDQPLPTTMLKKQEEKEILKSQLDSLLGLYHLLDWFAVDESNEVDPEFSARLTGIKLEMEPSLSFYNKARNYATKKPYSVEKFKLNFQMPTLASGWDVNKEKNNGAILFVKNGLYYLGIMPKQKGRYKALSFEPTEKTSEGFDKMYYDYFPDAAKMIPKCSTQLKAVTAHFQTHTTPILLSNNFIEPLEITKEIYDLNNPEKEPKKFQTAYAGGYREALCKWIDFTRDFLSKYTKTTSIDLSSLRPSSQYKDLGEYYAELNPLLYHISFQRIAEKEIMDAVETGKLYLFQIYNKDFAKGHHGKPNLHTLYWTGLFSPENLAKTSIKLNGQAELFYRPKSRMKRMAHRLGEKMLNKKLKDQKTPIPDTLYQELYDYVNHRLSHDLSDEARALLPNVITKEVSHEIIKDRRFTSDKFFFHVPITLNYQAANSPSKFNQRVNAYLKEHPETPIIGIDRGERNLIYITVIDSTGKILEQRSLNTIQQFDYQKKLDNREKERVAARQAWSVVGTIKDLKQGYLSQVIHEIVDLMIHYQAVVVLENLNFGFKSKRTGIAEKAVYQQFEKMLIDKLNCLVLKDYPAEKVGGVLNPYQLTDQFTSFAKMGTQSGFLFYVPAPYTSKIDPLTGFVDPFVWKTIKNHESRKHFLEGFDFLHYDVKTGDFILHFKMNRNLSFQRGLPGFMPAWDIVFEKNETQFDAKGTPFIAGKRIVPVIENHRFTGRYRDLYPANELIALLEEKGIVFRDGSNILPKLLENDDSHAIDTMVALIRSVLQMRNSNAATGEDYINSPVRDLNGVCFDSRFQNPEWPMDADANGAYHIALKGQLLLNHLKESKDLKLQNGISNQDWLAYIQELRN

SEQ ID NO: 692 - protein, 1129 aa, Alicyclobacillus acidoterrestris
MAVKSIKVKLRLDDMPEIRAGLWKLHKEVNAGVRYYTEWLSLLRQENLYRRSPNGDGEQECDKTAEECKAELLERLRARQVENGHRGPAGSDDELLQLARQLYELLVPQAIGAKGDAQQIARKFLSPLADKDAVGGLGIAKAGNKPRWVRMREAGEPGWEEEKEKAETRKSADRTADVLRALADFGLKPLMRVYTDSEMSSVEWKPLRKGQAVRTWDRDMFQQAIERMMSWESWNQRVGQEYAKLVEQKNRFEQKNFVGQEHLVHLVNQLQQDMKEASPGLESKEQTAHYVTGRALRGSDKVFEKWGKLAPDAPFDLYDAEIKNVQRRNTRRFGSHDLFAKLAEPEYQALWREDASFLTRYAVYNSILRKLNHAKMFATFTLPDATAHPIWTRFDKLGGNLHQYTFLFNEFGERRHAIRFHKLLKVENGVAREVDDVTVPISMSEQLDNLLPRDPNEPIALYFRDYGAEQHFTGEFGGAKIQCRRDQLAHMHRRRGARDVYLNVSVRVQSQSEARGERRPPYAAVFRLVGDNHRAFVHFDKLSDYLAEHPDDGKLGSEGLLSGLRVMSVDLGLRTSASISVFRVARKDELKPNSKGRVPFFFPIKGNDNLVAVHERSQLLKLPGETESKDLRAIREERQRTLRQLRTQLAYLRLLVRCGSEDVGRRERSWAKLIEQPVDAANHMTPDWREAFENELQKLKSLHGICSDKEWMDAVYESVRRVWRHMGKQVRDWRKDVRSGERPKIRGYAKDVVGGNSIEQIEYLERQYKFLKSWSFFGKVSGQVIRAEKGSRFAITLREHIDHAKEDRLKKLADRIIMEALGYVYALDERGKGKWVAKYPPCQLILLEELSEYQFNNDRPPSENNQLMQWSHRGVFQELINQAQVHDLLVGTMYAAFSSRFDARTGAPGIRCRRVPARCTQEHNPEPFPWWLNKFVVEHTLDACPLRADDLIPTGEGEIFVSPFSAEEGDFHQIHADLNAAQNLQQRLWSDFDISQIRLRCDWGEVDGELVLIPRLTGKRTADSYSNKVFYTNTGVTYYERERGKKRRKVFAQEKLSEEEAELLVEADEAREKSVVLMRDPSGIINRGNWTRQKEFWSMVNQRIEGYLVKQIRSRVPLQDSACENTGDI

SEQ ID NO: 693 - protein, 1389 aa, Leptotrichia shahii
MGNLFGHKRWYEVRDKKDFKIKRKVKVKRNYDGNKYILNINENNNKEKIDNNKFIRKYINYKKNDNILKEFTRKFHAGNILFKLKGKEGIIRIENNDDFLETEEVVLYIEAYGKSEKLKALGITKKKIIDEAIRQGITKDDKKIEIKRQENEEEIEIDIRDEYTNKTLNDCSIILRIIENDELETKKSIYEIFKNINMSLYKIIEKIIENETEKVFENRYYEEHLREKLLKDDKIDVILTNFMEIREKIKSNLEILGFVKFYLNVGGDKKKSKNKKMLVEKILNINVDLTVEDIADFVIKELEFWNITKRIEKVKKVNNEFLEKRRNRTYIKSYVLLDKHEKFKIERENKKDKIVKFFVENIKNNSIKEKIEKILAEFKIDELIKKLEKELKKGNCDTEIFGIFKKHYKVNFDSKKFSKKSDEEKELYKIIYRYLKGRIEKILVNEQKVRLKKMEKIEIEKILNESILSEKILKRVKQYTLEHIMYLGKLRHNDIDMTTVNTDDFSRLHAKEELDLELITFFASTNMELNKIFSRENINNDENIDFFGGDREKNYVLDKKILNSKIKIIRDLDFIDNKNNITNNFIRKFTKIGTNERNRILHAISKERDLQGTQDDYNKVINIIQNLKISDEEVSKALNLDVVFKDKKNIITKINDIKISEENNNDIKYLPSFSKVLPEILNLYRNNPKNEPFDTIETEKIVLNALIYVNKELYKKLILEDDLEENESKNIFLQELKKTLGNIDEIDENIIENYYKNAQISASKGNNKAIKKYQKKVIECYIGYLRKNYEELFDFSDFKMNIQEIKKQIKDINDNKTYERITVKTSDKTIVINDDFEYIISIFALLNSNAVINKIRNRFFATSVWLNTSEYQNIIDILDEIMQLNTLRNECITENWNLNLEEFIQKMKEIEKDFDDFKIQTKKEIFNNYYEDIKNNILTEFKDDINGCDVLEKKLEKIVIFDDETKFEIDKKSNILQDEQRKLSNINKKDLKKKVDQYIKDKDQEIKSKILCRIIFNSDFLKKYKKEIDNLIEDMESENENKFQEIYYPKERKNELYIYKKNLFLNIGNPNFDKIYGLISNDIKMADAKFLFNIDGKNIRKNKISEIDAILKNLNDKLNGYSKEYKEKYIKKLKENDDFFAKNIQNKNYKSFEKDYNRVSEYKKIRDLVEFNYLNKIESYLIDINWKLAIQMARFERDMHYIVNGLRELGIIKLSGYNTGISRAYPKRNGSDGFYTTTAYYKFFDEESYKKFEKICYGFGIDLSENSEINKPENESIRNYISHFYIVRNPFADYSIAEQIDRVSNLLSYSTRYNNSTYASVFEVFKKDVNLDYDELKKKFKLIGNNDILERLMKPKKVSVLELESYNSDYIKNLIIELLTKIENTNDTL

SEQ ID NO: 694 - protein, 1050 aa, synthetic construct
  REGION 1..1050: note = Synthetic Polypeptide
MRSNYHGGRNARQWRKQISGLARRTKETVFTYKFPLETDAAEIDFDKAVQTYGIAEGVGHGSLIGLVCAFHLSGFRLFSKAGEAMAFRNRSRYPTDAFAEKLSAIMGIQLPTLSPEGLDLIFQSPPRSRDGIAPVWSENEVRNRLYTNWTGRGPANKPDEHLLEIAGEIAKQVFPKFGGWDDLASDPDKALAAADKYFQSQGDFPSIASLPAAIMLSPANSTVDFEGDYIAIDPAAETLLHQAVSRCAARLGRERPDLDQNKGPFVSSLQDALVSSQNNGLSWLFGVGFQHWKEKSPKELIDEYKVPADQHGAVTQVKSFVDAIPLNPLFDTTHYGEFRASVAGKVRSWVANYWKRLLDLKSLLATTEFTLPESISDPKAVSLFSGLLVDPQGLKKVADSLPARLVSAEEAIDRLMGVGIPTAADIAQVERVADEIGAFIGQVQQFNNQVKQKLENLQDADDEEFLKGLKIELPSGDKEPPAINRISGGAPDAAAEISELEEKLQRLLDARSEHFQTISEWAEENAVTLDPIAAMVELERLRLAERGATGDPEEYALRLLLQRIGRLANRVSPVSAGSIRELLKPVFMEEREFNLFFHNRLGSLYRSPYSTSRHQPFSIDVGKAKAIDWIAGLDQISSDIEKALSGAGEALGDQLRDWINLAGFAISQRLRGLPDTVPNALAQVRCPDDVRIPPLLAMLLEEDDIARDVCLKAFNLYVSAINGCLFGALREGFIVRTRFQRIGTDQIHYVPKDKAWEYPDRLNTAKGPINAAVSSDWIEKDGAVIKPVETVRNLSSTGFAGAGVSEYLVQAPHDWYTPLDLRDVAHLVTGLPVEKNITKLKRLTNRTAFRMVGASSFKTHLDSVLLSDKIKLGDFTIIIDQHYRQSVTYGGKVKISYEPERLQVEAAVPVVDTRDRTVPEPDTLFDHIVAIDLGERSVGFAVFDIKSCLRTGEVKPIHDNNGNPVVGTVAVPSIRRLMKAVRSHRRRRQPNQKVNQTYSTALQNYRENVIGDVCNRIDTLMERYNAFPVLEFQIKNFQAGAKQLEIVYGS

SEQ ID NO: 695 - protein, 345 aa, Staphylococcus aureus
MEVPLYNIFGDNYIIQVATEAENSTIYNNKVEIDDEELRNVLNLAYKIAKNNEDAAAERRGKAKKKKGEEGETTTSNIILPLSGNDKNPWTETLKCYNFPTTVALSEVFKNFSQVKECEEVSAPSFVKPEFYEFGRSPGMVERTRRVKLEVEPHYLIIAAAGWVLTRLGKAKVSEGDYVGVNVFTPTRGILYSLIQNVNGIVPGIKPETAFGLWIARKVVSSVTNPNVSVVRIYTISDAVGQNPTTINGGFSIDLTKLLEKRYLLSERLEAIARNALSISSNMRERYIVLANYIYEYLTGSKRLEDLLYFANRDLIMNLNSDDGKVRDLKLISAYVNGELIRGEG

SEQ ID NO: 696 - protein, 345 aa, Staphylococcus aureus
MEVPLYNIFGDNYIIQVATEAENSTIYNNKVEIDDEELRNVLNLAYKIAKNNEDAAAERRGKAKKKKGEEGETTTSNIILPLSGNDKNPWTETLKCYNFPTTVALSEVFKNFSQVKECEEVSAPSFVKPEFYKFGRSPGMVERTRRVKLEVEPHYLIMAAAGWVLTRLGKAKVSEGDYVGVNVFTPTRGILYSLIQNVNGIVPGIKPETAFGLWIARKVVSSVTNPNVSVVSIYTISDAVGQNPTTINGGFSIDLTKLLEKRDLLSERLEAIARNALSISSNMRERYIVLANYIYEYLTGSKRLEDLLYFANRDLIMNLNSDDGKVRDLKLISAYVNGELIRGEG

SEQ ID NO: 697 - protein, 1210 aa, Staphylococcus aureus
MSKRHPRISGVKGYRLHAQRLEYTGKSGAMRTIKYPLYSSPSGGRTVPREIVSAINDDYVGLYGLSNFDDLYNAEKRNEEKVYSVLDFWYDCVQYGAVFSYTAPGLLKNVAEVRGGSYELTKTLKGSHLYDELQIDKVIKFLNKKEISRANGSLDKLKKDIIDCFKAEYRERHKDQCNKLADDIKNAKKDAGASLGERQKKLFRDFFGISEQSENDKPSFTNPLNLTCCLLPFDTVNNNRNRGEVLFNKLKEYAQKLDKNEGSLEMWEYIGIGNSGTAFSNFLGEGFLGRLRENKITELKKAMMDITDAWRGQEQEEELEKRLRILAALTIKLREPKFDNHWGGYRSDINGKLSSWLQNYINQTVKIKEDLKGHKKDLKKAKEMINRFGESDTKEEAVVSSLLESIEKIVPDDSADDEKPDIPAIAIYRRFLSDGRLTLNRFVQREDVQEALIKERLEAEKKKKPKKRKKKSDAEDEKETIDFKELFPHLAKPLKLVPNFYGDSKRELYKKYKNAAIYTDALWKAVEKIYKSAFSSSLKNSFFDTDFDKDFFIKRLQKIFSVYRRFNTDKWKPIVKNSFAPYCDIVSLAENEVLYKPKQSRSRKSAAIDKNRVRLPSTENIAKAGIALARELSVAGFDWKDLLKKEEHEEYIDLIELHKTALALLLAVTETQLDISALDFVENGTVKDFMKTRDGNLVLEGRFLEMFSQSIVFSELRGLAGLMSRKEFITRSAIQTMNGKQAELLYIPHEFQSAKITTPKEMSRAFLDLAPAEFATSLEPESLSEKSLLKLKQMRYYPHYFGYELTRTGQGIDGGVAENALRLEKSPVKKREIKCKQYKTLGRGQNKIVLYVRSSYYQTQFLEWFLHRPKNVQTDVAVSGSFLIDEKKVKTRWNYDALTVALEPVSGSERVFVSQPFTIFPEKSAEEEGQRYLGIDIGEYGIAYTALEITGDSAKILDQNFISDPQLKTLREEVKGLKLDQRRGTFAMPSTKIARIRESLVHSLRNRIHHLALKHKAKIVYELEVSRFEEGKQKIKKVYATLKKADVYSEIDADKNLQTTVWGKLAVASEISASYTSQFCGACKKLWRAEMQVDETITTQELIGTVRVIKGGTLIDAIKDFMRPPIFDENDTPFPKYRDFCDKHHISKKMRGNSCLFICPFCRANADADIQASQTIALLRYVKEEKKVEDYFERFRKLKNIKVLGQMKKI

SEQ ID NO: 698 - protein, 1368 aa, synthetic construct
  REGION 1..1368: note = Synthetic Polypeptide
MDKKYSIGLAIGTNSVGWAVITDEYKVPSKKFKVLGNTDRHSIKKNLIGALLFDSGETAEATRLKRTARRRYTRRKNRICYLQEIFSNEMAKVDDSFFHRLEESFLVEEDKKHERHPIFGNIVDEVAYHEKYPTIYHLRKKLVDSTDKADLRLIYLALAHMIKFRGHFLIEGDLNPDNSDVDKLFIQLVQTYNQLFEENPINASGVDAKAILSARLSKSRRLENLIAQLPGEKKNGLFGNLIALSLGLTPNFKSNFDLAEDAKLQLSKDTYDDDLDNLLAQIGDQYADLFLAAKNLSDAILLSDILRVNTEITKAPLSASMIKRYDEHHQDLTLLKALVRQQLPEKYKEIFFDQSKNGYAGYIDGGASQEEFYKFIKPILEKMDGTEELLVKLNREDLLRKQRTFDNGSIPHQIHLGELHAILRRQEDFYPFLKDNREKIEKILTFRIPYYVGPLARGNSRFAWMTRKSEETITPWNFEEVVDKGASAQSFIERMTNFDKNLPNEKVLPKHSLLYEYFTVYNELTKVKYVTEGMRKPAFLSGEQKKAIVDLLFKTNRKVTVKQLKEDYFKKIECFDSVEISGVEDRFNASLGTYHDLLKIIKDKDFLDNEENEDILEDIVLTLTLFEDREMIEERLKTYAHLFDDKVMKQLKRRRYTGWGRLSRKLINGIRDKQSGKTILDFLKSDGFANRNFMQLIHDDSLTFKEDIQKAQVSGQGDSLHEHIANLAGSPAIKKGILQTVKVVDELVKVMGRHKPENIVIEMARENQTTQKGQKNSRERMKRIEEGIKELGSQILKEHPVENTQLQNEKLYLYYLQNGRDMYVDQELDINRLSDYDVDAIVPQSFLKDDSIDNKVLTRSDKNRGKSDNVPSEEVVKKMKNYWRQLLNAKLITQRKFDNLTKAERGGLSELDKAGFIKRQLVETRQITKHVAQILDSRMNTKYDENDKLIREVKVITLKSKLVSDFRKDFQFYKVREINNYHHAHDAYLNAVVGTALIKKYPKLESEFVYGDYKVYDVRKMIAKSEQEIGKATAKYFFYSNIMNFFKTEITLANGEIRKRPLIETNGETGEIVWDKGRDFATVRKVLSMPQVNIVKKTEVQTGGFSKESILPKRNSDKLIARKKDWDPKKYGGFDSPTVAYSVLVVAKVEKGKSKKLKSVKELLGITIMERSSFEKNPIDFLEAKGYKEVKKDLIIKLPKYSLFELENGRKRMLASAGELQKGNELALPSKYVNFLYLASHYEKLKGSPEDNEQKQLFVEQHKHYLDEIIEQISEFSKRVILADANLDKVLSAYNKHRDKPIREQAENIIHLFTLTNLGAPAAFKYFDTTIDRKRYTSTKEVLDATLIHQSITGLYETRIDLSQLGGD

SEQ ID NO: 699 - protein, 1052 aa, synthetic construct
  REGION 1..1052: note = Synthetic Polypeptide
KRNYILGLDIGITSVGYGIIDYETRDVIDAGVRLFKEANVENNEGRRSKRGARRLKRRRRHRIQRVKKLLFDYNLLTDHSELSGINPYEARVKGLSQKLSEEEFSAALLHLAKRRGVHNVNEVEEDTGNELSTKEQISRNSKALEEKYVAELQLERLKKDGEVRGSINRFKTSDYVKEAKQLLKVQKAYHQLDQSFIDTYIDLLETRRTYYEGPGEGSPFGWKDIKEWYEMLMGHCTYFPEELRSVKYAYNADLYNALNDLNNLVITRDENEKLEYYEKFQIIENVFKQKKKPTLKQIAKEILVNEEDIKGYRVTSTGKPEFTNLKVYHDIKDITARKEIIENAELLDQIAKILTIYQSSEDIQEELTNLNSELTQEEIEQISNLKGYTGTHNLSLKAINLILDELWHTNDNQIAIFNRLKLVPKKVDLSQQKEIPTTLVDDFILSPVVKRSFIQSIKVINAIIKKYGLPNDIIIELAREKNSKDAQKMINEMQKRNRQTNERIEEIIRTTGKENAKYLIEKIKLHDMQEGKCLYSLEAIPLEDLLNNPFNYEVDHIIPRSVSFDNSFNNKVLVKQEENSKKGNRTPFQYLSSSDSKISYETFKKHILNLAKGKGRISKTKKEYLLEERDINRFSVQKDFINRNLVDTRYATRGLMNLLRSYFRVNNLDVKVKSINGGFTSFLRRKWKFKKERNKGYKHHAEDALIIANADFIFKEWKKLDKAKKVMENQMFEEKQAESMPEIETEQEYKEIFITPHQIKHIKDFKDYKYSHRVDKKPNRELINDTLYSTRKDDKGNTLIVNNLNGLYDKDNDKLKKLINKSPEKLLMYHHDPQTYQKLKLIMEQYGDEKNPLYKYYEETGNYLTKYSKKDNGPVIKKIKYYGNKLNAHLDITDDYPNSRNKVVKLSLKPYRFDVYLDNGVYKFVTVKNLDVIKKENYYEVNSKCYEEAKKLKKISNQAEFIASFYNNDLIKINGELYRVIGVNNDLLNRIEVNMIDITYREYLENMNDKRPPRIIKTIASKTQSIKKYSTDILGNLYEVKSKKHPQIIKKG

SEQ ID NO: 700 - protein, 1052 aa, synthetic construct
  REGION 1..1052: note = Synthetic Polypeptide
KRNYILGLDIGITSVGYGIIDYETRDVIDAGVRLFKEANVENNEGRRSKRGARRLKRRRRHRIQRVKKLLFDYNLLTDHSELSGINPYEARVKGLSQKLSEEEFSAALLHLAKRRGVHNVNEVEEDTGNELSTKEQISRNSKALEEKYVAELQLERLKKDGEVRGSINRFKTSDYVKEAKQLLKVQKAYHQLDQSFIDTYIDLLETRRTYYEGPGEGSPFGWKDIKEWYEMLMGHCTYFPEELRSVKYAYNADLYNALNDLNNLVITRDENEKLEYYEKFQIIENVFKQKKKPTLKQIAKEILVNEEDIKGYRVTSTGKPEFTNLKVYHDIKDITARKEIIENAELLDQIAKILTIYQSSEDIQEELTNLNSELTQEEIEQISNLKGYTGTHNLSLKAINLILDELWHTNDNQIAIFNRLKLVPKKVDLSQQKEIPTTLVDDFILSPVVKRSFIQSIKVINAIIKKYGLPNDIIIELAREKNSKDAQKMINEMQKRNRQTNERIEEIIRTTGKENAKYLIEKIKLHDMQEGKCLYSLEAIPLEDLLNNPFNYEVDHIIPRSVSFDNSFNNKVLVKQEEASKKGNRTPFQYLSSSDSKISYETFKKHILNLAKGKGRISKTKKEYLLEERDINRFSVQKDFINRNLVDTRYATRGLMNLLRSYFRVNNLDVKVKSINGGFTSFLRRKWKFKKERNKGYKHHAEDALIIANADFIFKEWKKLDKAKKVMENQMFEEKQAESMPEIETEQEYKEIFITPHQIKHIKDFKDYKYSHRVDKKPNRELINDTLYSTRKDDKGNTLIVNNLNGLYDKDNDKLKKLINKSPEKLLMYHHDPQTYQKLKLIMEQYGDEKNPLYKYYEETGNYLTKYSKKDNGPVIKKIKYYGNKLNAHLDITDDYPNSRNKVVKLSLKPYRFDVYLDNGVYKFVTVKNLDVIKKENYYEVNSKCYEEAKKLKKISNQAEFIASFYNNDLIKINGELYRVIGVNNDLLNRIEVNMIDITYREYLENMNDKRPPRIIKTIASKTQSIKKYSTDILGNLYEVKSKKHPQIIKKG

SEQ ID NO: 701 - protein, 1052 aa, synthetic construct
  REGION 1..1052: note = Synthetic Polypeptide
KRNYILGLDIGITSVGYGIIDYETRDVIDAGVRLFKEANVENNEGRRSKRGARRLKRRRRHRIQRVKKLLFDYNLLTDHSELSGINPYEARVKGLSQKLSEEEFSAALLHLAKRRGVHNVNEVEEDTGNELSTKEQISRNSKALEEKYVAELQLERLKKDGEVRGSINRFKTSDYVKEAKQLLKVQKAYHQLDQSFIDTYIDLLETRRTYYEGPGEGSPFGWKDIKEWYEMLMGHCTYFPEELRSVKYAYNADLYNALNDLNNLVITRDENEKLEYYEKFQIIENVFKQKKKPTLKQIAKEILVNEEDIKGYRVTSTGKPEFTNLKVYHDIKDITARKEIIENAELLDQIAKILTIYQSSEDIQEELTNLNSELTQEEIEQISNLKGYTGTHNLSLKAINLILDELWHTNDNQIAIFNRLKLVPKKVDLSQQKEIPTTLVDDFILSPVVKRSFIQSIKVINAIIKKYGLPNDIIIELAREKNSKDAQKMINEMQKRNRQTNERIEEIIRTTGKENAKYLIEKIKLHDMQEGKCLYSLEAIPLEDLLNNPFNYEVDHIIPRSVSFDNSFNNKVLVKQEEASKKGNRTPFQYLSSSDSKISYETFKKHILNLAKGKGRISKTKKEYLLEERDINRFSVQKDFINRNLVDTRYATRGLMNLLRSYFRVNNLDVKVKSINGGFTSFLRRKWKFKKERNKGYKHHAEDALIIANADFIFKEWKKLDKAKKVMENQMFEEKQAESMPEIETEQEYKEIFITPHQIKHIKDFKDYKYSHRVDKKPNRKLINDTLYSTRKDDKGNTLIVNNLNGLYDKDNDKLKKLINKSPEKLLMYHHDPQTYQKLKLIMEQYGDEKNPLYKYYEETGNYLTKYSKKDNGPVIKKIKYYGNKLNAHLDITDDYPNSRNKVVKLSLKPYRFDVYLDNGVYKFVTVKNLDVIKKENYYEVNSKCYEEAKKLKKISNQAEFIASFYKNDLIKINGELYRVIGVNNDLLNRIEVNMIDITYREYLENMNDKRPPHIIKTIASKTQSIKKYSTDILGNLYEVKSKKHPQIIKKG

SEQ ID NO: 702 - protein, 1052 aa, synthetic construct
  REGION 1..1052: note = Synthetic Polypeptide
KRNYILGLAIGITSVGYGIIDYETRDVIDAGVRLFKEANVENNEGRRSKRGARRLKRRRRHRIQRVKKLLFDYNLLTDHSELSGINPYEARVKGLSQKLSEEEFSAALLHLAKRRGVHNVNEVEEDTGNELSTKEQISRNSKALEEKYVAELQLERLKKDGEVRGSINRFKTSDYVKEAKQLLKVQKAYHQLDQSFIDTYIDLLETRRTYYEGPGEGSPFGWKDIKEWYEMLMGHCTYFPEELRSVKYAYNADLYNALNDLNNLVITRDENEKLEYYEKFQIIENVFKQKKKPTLKQIAKEILVNEEDIKGYRVTSTGKPEFTNLKVYHDIKDITARKEIIENAELLDQIAKILTIYQSSEDIQEELTNLNSELTQEEIEQISNLKGYTGTHNLSLKAINLILDELWHTNDNQIAIFNRLKLVPKKVDLSQQKEIPTTLVDDFILSPVVKRSFIQSIKVINAIIKKYGLPNDIIIELAREKNSKDAQKMINEMQKRNRQTNERIEEIIRTTGKENAKYLIEKIKLHDMQEGKCLYSLEAIPLEDLLNNPFNYEVDHIIPRSVSFDNSFNNKVLVKQEENSKKGNRTPFQYLSSSDSKISYETFKKHILNLAKGKGRISKTKKEYLLEERDINRFSVQKDFINRNLVDTRYATRGLMNLLRSYFRVNNLDVKVKSINGGFTSFLRRKWKFKKERNKGYKHHAEDALIIANADFIFKEWKKLDKAKKVMENQMFEEKQAESMPEIETEQEYKEIFITPHQIKHIKDFKDYKYSHRVDKKPNRELINDTLYSTRKDDKGNTLIVNNLNGLYDKDNDKLKKLINKSPEKLLMYHHDPQTYQKLKLIMEQYGDEKNPLYKYYEETGNYLTKYSKKDNGPVIKKIKYYGNKLNAHLDITDDYPNSRNKVVKLSLKPYRFDVYLDNGVYKFVTVKNLDVIKKENYYEVNSKCYEEAKKLKKISNQAEFIASFYNNDLIKINGELYRVIGVNNDLLNRIEVNMIDITYREYLENMNDKRPPRIIKTIASKTQSIKKYSTDILGNLYEVKSKKHPQIIKKG

SEQ ID NO: 703 - protein, 1367 aa, synthetic construct
  REGION 1..1367: note = Synthetic Polypeptide
DKKYSIGLDIGTNSVGWAVITDEYKVPSKKFKVLGNTDRHSIKKNLIGALLFDSGETAEATRLKRTARRRYTRRKNRICYLQEIFSNEMAKVDDSFFHRLEESFLVEEDKKHERHPIFGNIVDEVAYHEKYPTIYHLRKKLVDSTDKADLRLIYLALAHMIKFRGHFLIEGDLNPDNSDVDKLFIQLVQTYNQLFEENPINASGVDAKAILSARLSKSRRLENLIAQLPGEKKNGLFGNLIALSLGLTPNFKSNFDLAEDAKLQLSKDTYDDDLDNLLAQIGDQYADLFLAAKNLSDAILLSDILRVNTEITKAPLSASMIKRYDEHHQDLTLLKALVRQQLPEKYKEIFFDQSKNGYAGYIDGGASQEEFYKFIKPILEKMDGTEELLVKLNREDLLRKQRTFDNGSIPHQIHLGELHAILRRQEDFYPFLKDNREKIEKILTFRIPYYVGPLARGNSRFAWMTRKSEETITPWNFEEVVDKGASAQSFIERMTNFDKNLPNEKVLPKHSLLYEYFTVYNELTKVKYVTEGMRKPAFLSGEQKKAIVDLLFKTNRKVTVKQLKEDYFKKIECFDSVEISGVEDRFNASLGTYHDLLKIIKDKDFLDNEENEDILEDIVLTLTLFEDREMIEERLKTYAHLFDDKVMKQLKRRRYTGWGRLSRKLINGIRDKQSGKTILDFLKSDGFANRNFMQLIHDDSLTFKEDIQKAQVSGQGDSLHEHIANLAGSPAIKKGILQTVKVVDELVKVMGRHKPENIVIEMARENQTTQKGQKNSRERMKRIEEGIKELGSQILKEHPVENTQLQNEKLYLYYLQNGRDMYVDQELDINRLSDYDVDHIVPQSFLKDDSIDNKVLTRSDKNRGKSDNVPSEEVVKKMKNYWRQLLNAKLITQRKFDNLTKAERGGLSELDKAGFIKRQLVETRQITKHVAQILDSRMNTKYDENDKLIREVKVITLKSKLVSDFRKDFQFYKVREINNYHHAHDAYLNAVVGTALIKKYPKLESEFVYGDYKVYDVRKMIAKSEQEIGKATAKYFFYSNIMNFFKTEITLANGEIRKRPLIETNGETGEIVWDKGRDFATVRKVLSMPQVNIVKKTEVQTGGFSKESILPKRNSDKLIARKKDWDPKKYGGFDSPTVAYSVLVVAKVEKGKSKKLKSVKELLGITIMERSSFEKNPIDFLEAKGYKEVKKDLIIKLPKYSLFELENGRKRMLASAGELQKGNELALPSKYVNFLYLASHYEKLKGSPEDNEQKQLFVEQHKHYLDEIIEQISEFSKRVILADANLDKVLSAYNKHRDKPIREQAENIIHLFTLTNLGAPAAFKYFDTTIDRKRYTSTKEVLDATLIHQSITGLYETRIDLSQLGGD

SEQ ID NO: 704 - protein, 1367 aa, synthetic construct
  REGION 1..1367: note = Synthetic Polypeptide
DKKYSIGLAIGTNSVGWAVITDEYKVPSKKFKVLGNTDRHSIKKNLIGALLFDSGETAEATRLKRTARRRYTRRKNRICYLQEIFSNEMAKVDDSFFHRLEESFLVEEDKKHERHPIFGNIVDEVAYHEKYPTIYHLRKKLVDSTDKADLRLIYLALAHMIKFRGHFLIEGDLNPDNSDVDKLFIQLVQTYNQLFEENPINASGVDAKAILSARLSKSRRLENLIAQLPGEKKNGLFGNLIALSLGLTPNFKSNFDLAEDAKLQLSKDTYDDDLDNLLAQIGDQYADLFLAAKNLSDAILLSDILRVNTEITKAPLSASMIKRYDEHHQDLTLLKALVRQQLPEKYKEIFFDQSKNGYAGYIDGGASQEEFYKFIKPILEKMDGTEELLVKLNREDLLRKQRTFDNGSIPHQIHLGELHAILRRQEDFYPFLKDNREKIEKILTFRIPYYVGPLARGNSRFAWMTRKSEETITPWNFEEVVDKGASAQSFIERMTNFDKNLPNEKVLPKHSLLYEYFTVYNELTKVKYVTEGMRKPAFLSGEQKKAIVDLLFKTNRKVTVKQLKEDYFKKIECFDSVEISGVEDRFNASLGTYHDLLKIIKDKDFLDNEENEDILEDIVLTLTLFEDREMIEERLKTYAHLFDDKVMKQLKRRRYTGWGRLSRKLINGIRDKQSGKTILDFLKSDGFANRNFMQLIHDDSLTFKEDIQKAQVSGQGDSLHEHIANLAGSPAIKKGILQTVKVVDELVKVMGRHKPENIVIEMARENQTTQKGQKNSRERMKRIEEGIKELGSQILKEHPVENTQLQNEKLYLYYLQNGRDMYVDQELDINRLSDYDVDHIVPQSFLKDDSIDNKVLTRSDKNRGKSDNVPSEEVVKKMKNYWRQLLNAKLITQRKFDNLTKAERGGLSELDKAGFIKRQLVETRQITKHVAQILDSRMNTKYDENDKLIREVKVITLKSKLVSDFRKDFQFYKVREINNYHHAHDAYLNAVVGTALIKKYPKLESEFVYGDYKVYDVRKMIAKSEQEIGKATAKYFFYSNIMNFFKTEITLANGEIRKRPLIETNGETGEIVWDKGRDFATVRKVLSMPQVNIVKKTEVQTGGFSKESILPKRNSDKLIARKKDWDPKKYGGFDSPTVAYSVLVVAKVEKGKSKKLKSVKELLGITIMERSSFEKNPIDFLEAKGYKEVKKDLIIKLPKYSLFELENGRKRMLASAGELQKGNELALPSKYVNFLYLASHYEKLKGSPEDNEQKQLFVEQHKHYLDEIIEQISEFSKRVILADANLDKVLSAYNKHRDKPIREQAENIIHLFTLTNLGAPAAFKYFDTTIDRKRYTSTKEVLDATLIHQSITGLYETRIDLSQLGGD

SEQ ID NO: 705 - protein, 1367 aa, synthetic construct
  REGION 1..1367: note = Synthetic Polypeptide
DKKYSIGLAIGTNSVGWAVITDEYKVPSKKFKVLGNTDRHSIKKNLIGALLFDSGETAEATRLKRTARRRYTRRKNRICYLQEIFSNEMAKVDDSFFHRLEESFLVEEDKKHERHPIFGNIVDEVAYHEKYPTIYHLRKKLVDSTDKADLRLIYLALAHMIKFRGHFLIEGDLNPDNSDVDKLFIQLVQTYNQLFEENPINASGVDAKAILSARLSKSRRLENLIAQLPGEKKNGLFGNLIALSLGLTPNFKSNFDLAEDAKLQLSKDTYDDDLDNLLAQIGDQYADLFLAAKNLSDAILLSDILRVNTEITKAPLSASMIKRYDEHHQDLTLLKALVRQQLPEKYKEIFFDQSKNGYAGYIDGGASQEEFYKFIKPILEKMDGTEELLVKLNREDLLRKQRTFDNGSIPHQIHLGELHAILRRQEDFYPFLKDNREKIEKILTFRIPYYVGPLARGNSRFAWMTRKSEETITPWNFEEVVDKGASAQSFIERMTNFDKNLPNEKVLPKHSLLYEYFTVYNELTKVKYVTEGMRKPAFLSGEQKKAIVDLLFKTNRKVTVKQLKEDYFKKIECFDSVEISGVEDRFNASLGTYHDLLKIIKDKDFLDNEENEDILEDIVLTLTLFEDREMIEERLKTYAHLFDDKVMKQLKRRRYTGWGRLSRKLINGIRDKQSGKTILDFLKSDGFANRNFMQLIHDDSLTFKEDIQKAQVSGQGDSLHEHIANLAGSPAIKKGILQTVKVVDELVKVMGRHKPENIVIEMARENQTTQKGQKNSRERMKRIEEGIKELGSQILKEHPVENTQLQNEKLYLYYLQNGRDMYVDQELDINRLSDYDVDHIVPQSFLKDDSIDNKVLTRSDKNRGKSDNVPSEEVVKKMKNYWRQLLNAKLITQRKFDNLTKAERGGLSELDKAGFIKRQLVETRQITKHVAQILDSRMNTKYDENDKLIREVKVITLKSKLVSDFRKDFQFYKVREINNYHHAHDAYLNAVVGTALIKKYPKLESEFVYGDYKVYDVRKMIAKSEQEIGKATAKYFFYSNIMNFFKTEITLANGEIRKRPLIETNGETGEIVWDKGRDFATVRKVLSMPQVNIVKKTEVQTGGFSKESILPKRNSDKLIARKKDWDPKKYGGFESPTVAYSVLVVAKVEKGKSKKLKSVKELLGITIMERSSFEKNPIDFLEAKGYKEVKKDLIIKLPKYSLFELENGRKRMLASAGELQKGNELALPSKYVNFLYLASHYEKLKGSPEDNEQKQLFVEQHKHYLDEIIEQISEFSKRVILADANLDKVLSAYNKHRDKPIREQAENIIHLFTLTNLGAPAAFKYFDTTIDRKQYRSTKEVLDATLIHQSITGLYETRIDLSQLGGD

SEQ ID NO: 706 - protein, 1367 aa, synthetic construct
  REGION 1..1367: note = Synthetic Polypeptide
DKKYSIGLAIGTNSVGWAVITDEYKVPSKKFKVLGNTDRHSIKKNLIGALLFDSGETAEATRLKRTARRRYTRRKNRICYLQEIFSNEMAKVDDSFFHRLEESFLVEEDKKHERHPIFGNIVDEVAYHEKYPTIYHLRKKLVDSTDKADLRLIYLALAHMIKFRGHFLIEGDLNPDNSDVDKLFIQLVQTYNQLFEENPINASGVDAKAILSARLSKSRRLENLIAQLPGEKKNGLFGNLIALSLGLTPNFKSNFDLAEDAKLQLSKDTYDDDLDNLLAQIGDQYADLFLAAKNLSDAILLSDILRVNTEITKAPLSASMIKRYDEHHQDLTLLKALVRQQLPEKYKEIFFDQSKNGYAGYIDGGASQEEFYKFIKPILEKMDGTEELLVKLNREDLLRKQRTFDNGSIPHQIHLGELHAILRRQEDFYPFLKDNREKIEKILTFRIPYYVGPLARGNSRFAWMTRKSEETITPWNFEEVVDKGASAQSFIERMTNFDKNLPNEKVLPKHSLLYEYFTVYNELTKVKYVTEGMRKPAFLSGEQKKAIVDLLFKTNRKVTVKQLKEDYFKKIECFDSVEISGVEDRFNASLGTYHDLLKIIKDKDFLDNEENEDILEDIVLTLTLFEDREMIEERLKTYAHLFDDKVMKQLKRRRYTGWGRLSRKLINGIRDKQSGKTILDFLKSDGFANRNFMQLIHDDSLTFKEDIQKAQVSGQGDSLHEHIANLAGSPAIKKGILQTVKVVDELVKVMGRHKPENIVIEMARENQTTQKGQKNSRERMKRIEEGIKELGSQILKEHPVENTQLQNEKLYLYYLQNGRDMYVDQELDINRLSDYDVDHIVPQSFLKDDSIDNKVLTRSDKNRGKSDNVPSEEVVKKMKNYWRQLLNAKLITQRKFDNLTKAERGGLSELDKAGFIKRQLVETRQITKHVAQILDSRMNTKYDENDKLIREVKVITLKSKLVSDFRKDFQFYKVREINNYHHAHDAYLNAVVGTALIKKYPKLESEFVYGDYKVYDVRKMIAKSEQEIGKATAKYFFYSNIMNFFKTEITLANGEIRKRPLIETNGETGEIVWDKGRDFATVRKVLSMPQVNIVKKTEVQTGGFSKESILPKRNSDKLIARKKDWDPKKYGGFVSPTVAYSVLVVAKVEKGKSKKLKSVKELLGITIMERSSFEKNPIDFLEAKGYKEVKKDLIIKLPKYSLFELENGRKRMLASAGELQKGNELALPSKYVNFLYLASHYEKLKGSPEDNEQKQLFVEQHKHYLDEIIEQISEFSKRVILADANLDKVLSAYNKHRDKPIREQAENIIHLFTLTNLGAPAAFKYFDTTIDRKQYRSTKEVLDATLIHQSITGLYETRIDLSQLGGD

SEQ ID NO: 707 - protein, 1367 aa, synthetic construct
  REGION 1..1367: note = Synthetic Polypeptide
DKKYSIGLAIGTNSVGWAVITDEYKVPSKKFKVLGNTDRHSIKKNLIGALLFDSGETAEATRLKRTARRRYTRRKNRICYLQEIFSNEMAKVDDSFFHRLEESFLVEEDKKHERHPIFGNIVDEVAYHEKYPTIYHLRKKLVDSTDKADLRLIYLALAHMIKFRGHFLIEGDLNPDNSDVDKLFIQLVQTYNQLFEENPINASGVDAKAILSARLSKSRRLENLIAQLPGEKKNGLFGNLIALSLGLTPNFKSNFDLAEDAKLQLSKDTYDDDLDNLLAQIGDQYADLFLAAKNLSDAILLSDILRVNTEITKAPLSASMIKRYDEHHQDLTLLKALVRQQLPEKYKEIFFDQSKNGYAGYIDGGASQEEFYKFIKPILEKMDGTEELLVKLNREDLLRKQRTFDNGSIPHQIHLGELHAILRRQEDFYPFLKDNREKIEKILTFRIPYYVGPLARGNSRFAWMTRKSEETITPWNFEEVVDKGASAQSFIERMTNFDKNLPNEKVLPKHSLLYEYFTVYNELTKVKYVTEGMRKPAFLSGEQKKAIVDLLFKTNRKVTVKQLKEDYFKKIECFDSVEISGVEDRFNASLGTYHDLLKIIKDKDFLDNEENEDILEDIVLTLTLFEDREMIEERLKTYAHLFDDKVMKQLKRRRYTGWGRLSRKLINGIRDKQSGKTILDFLKSDGFANRNFMQLIHDDSLTFKEDIQKAQVSGQGDSLHEHIANLAGSPAIKKGILQTVKVVDELVKVMGRHKPENIVIEMARENQTTQKGQKNSRERMKRIEEGIKELGSQILKEHPVENTQLQNEKLYLYYLQNGRDMYVDQELDINRLSDYDVDHIVPQSFLKDDSIDNKVLTRSDKNRGKSDNVPSEEVVKKMKNYWRQLLNAKLITQRKFDNLTKAERGGLSELDKAGFIKRQLVETRQITKHVAQILDSRMNTKYDENDKLIREVKVITLKSKLVSDFRKDFQFYKVREINNYHHAHDAYLNAVVGTALIKKYPKLESEFVYGDYKVYDVRKMIAKSEQEIGKATAKYFFYSNIMNFFKTEITLANGEIRKRPLIETNGETGEIVWDKGRDFATVRKVLSMPQVNIVKKTEVQTGGFSKESILPKRNSDKLIARKKDWDPKKYGGFVSPTVAYSVLVVAKVEKGKSKKLKSVKELLGITIMERSSFEKNPIDFLEAKGYKEVKKDLIIKLPKYSLFELENGRKRMLASARELQKGNELALPSKYVNFLYLASHYEKLKGSPEDNEQKQLFVEQHKHYLDEIIEQISEFSKRVILADANLDKVLSAYNKHRDKPIREQAENIIHLFTLTNLGAPAAFKYFDTTIDRKEYRSTKEVLDATLIHQSITGLYETRIDLSQLGGD

SEQ ID NO: 708 - protein, 1367 aa, synthetic construct; identical to SEQ ID NO: 338
  REGION 1..1367: note = Synthetic Polypeptide

SEQ ID NO: 709 - protein, 1612 aa, synthetic construct; identical to SEQ ID NO: 339
  REGION 1..1612: note = Synthetic Polypeptide

SEQ ID NO: 710 - protein, 173 aa, Staphylococcus aureus
AKPAKRIKSAAAAYVPQNRDAVITDIKRIGDLQREASRLETEMNDAIAEITEKFAARIAPIKTDIETLSKGVQGWCEANRDELTNGGKVKTANLVTGDVSWRVRPPSVSIRGMDAVMETLERLGLQRFIRTKQEINKEAILLEPKAVAGVAGITVKSGIEDFSIIPFEQEAGI

SEQ ID NO: 711 - protein, 174 aa, Staphylococcus aureus
MAKPAKRIKSAAAAYVPQNRDAVITDIKRIGDLQREASRLETEMNDAIAEITEKFAARIAPIKTDIETLSKGVQGWCEANRDELTNGGKVKTANLVTGDVSWRVRPPSVSIRGMDAVMETLERLGLQRFIRTKQEINKEAILLEPKAVAGVAGITVKSGIEDFSIIPFEQEAGI

SEQ ID NO: 712 - protein, 174 aa, Staphylococcus aureus
MAKPAKRIKSAAAAYVPQNRDAVITDIKRIGDLQREASRLETEMNDAIAEITEKFAARIAPIKTDIETLSKGVQGWCEANRDELTNGGKVKTANLVTGDVSWRVRPPSVSIRGMDAVMETLERLGLQRFVRTKQEINKEAILLEPKAVAGVAGITVKSGIEDFSIIPFEQEAGI

SEQ ID NO: 713 - protein, 174 aa, Escherichia coli
MAKPAKRIKSAAAAYVPQNRDAVITDIKRIGDLQREASRLETEMNDAIAEITEKFAARIAPLKTDIETLSKGVQGWCEANRDELTNGGKVKTANLVTGDVSWRVRPPSVSIRGMDAVMETLERLGLQRFIRTKQEINKEAILLEPKAVAGVAGITVKSGIEDFSIIPFEQEAGI

SEQ ID NO: 714 - protein, 174 aa, Escherichia coli
MAKPAKRIKSAAAAYVPQNRDAVITDIKRIGDLQREASRLETEMNDAIAEITEKFAARIAPIKTDIETLSKGVQGWCEANRDELTNGGKVKTANLITGDVSWRVRPPSVSIRGMDAVMETLERLGLQRFIRTKQEINKEAILLEPKAVAGVAGITVKSGIEDFSIIPFEQEAGI

SEQ ID NO: 715 - protein, 174 aa, Shigella sonnei
MAKPAKRIRNAAAAYVPQSRDAVVCDIRRIGDLQREAARLETEMNDAIAEITEKYASQIAPLKTSIETLSKGVQGWCEANRDELTNGGKVKTANLVTGDVSWRQRPPSVSIRGVDAVMETLERLGLQRFIRTKQEINKEAILLEPKAVAGVAGITVKSGIEDFSIIPFEQEAGI

SEQ ID NO: 716 - protein, 174 aa, Escherichia coli
MAKPAKRIKNAAAAYVPQSRDAVVCDIRRIGDLQREAARLETEMNDAIAEITEKYASQIAPLKTSIETISKGVQGWCEANRDELTNGGKVKTANLVTGDVSWRQRPPSVSIRGVDAVMETLERLGLQRFIRTKQEINKEAILLEPKAVAGVAGITVKSGIEDFSIIPFEQEAGI

SEQ ID NO: 717 - protein, 174 aa, Escherichia coli
MAKPAKRIKNAAAAYVPQSRDAVVCDIRRIGDLQREAARLETEMNDAIADITEKYASQIAPLKTSIETLSKGVQGWCEANRDELTNGGKVKTANLVTGDVSWRQRPPSVSIRGVDAVMETLERLGLQRFIRTKQEINKEAILLEPKAVAGVAGITVKSGIEDFSIIPFEQEAGI

SEQ ID NO: 718 - protein, 174 aa, Escherichia coli
MAKSAKRIRNAAAAYVPQSRDAVVCDIRRIGNLQREAARLETEMNDAIAEITEKFAARIAPLKTDIETLSKGVQGWCEANRDELTNGGKVKTANLVTGDVSWRQRPPSVSIRGVDAVMETLERLGLQRFIRTKQEINREAILLEPKAVAGVAGITVKSGIEDFSIIPFEQDAGI

SEQ ID NO: 719 - protein, 174 aa, Shigella sonnei
MAKPAKRIRNAAAAYVPQSRDAVVCDIRRIGDLQREAARLETEMNDAIAEITEKYASQIAPLKTSIETLSKGVQGWCEANRDELTNGGKVKTANLVTGDVSWRQRPPSVSIRGVDAVMETLERLGLQRFIRTKQEINKEAILLEPKAVAGVAGITVKSGIEDFSIIPFEQDAGI

SEQ ID NO: 720 - protein, 174 aa, Escherichia coli
MAKPAKRIKNAAAAYVPQSRDAVVCDIRRIGDLQREAARLETEMNDAIAEITEKYASQIAPLKTSIETLSKGVQGWCEANRDELTNGGKVKTANLVTGDVSWRLRPPSVSIRGVDAVMETLERLGLQRFICTKQEINKEAILLEPKVVAGVAGITVKSGIEDFSIIPFEQEAGI

SEQ ID NO: 721 - protein, 174 aa, Escherichia coli
MAKPVKRIRNAAAAYVPQSRDAVVCDIRRIGDLQREAARLETEMNDAIAEITEKYASQIAPLKTSIETLSKGIQGWCEANRDELTNGGKVKTANLVTGDVSWRQRPPSVSIRGVDAVMETLERLGLQRFIRTKQEINKEAILLEPKAVAGVAGITVKSGIEDFSIIPFEQEAGI

SEQ ID NO: 722 - protein, 174 aa, Escherichia coli
MAKPAKRIRNAAAAYVPQSRDAVVCDIRWIGDLQREAVRLETEMNDAIAEITEKYASRIAPLKTRIETLSKGVQGWCEANRDELTNGGKVKTANLVTGDVSWRQRPPSVSIRGVDAVMETLERLGLQRFIRTKQEINKEAILLEPKAVAGVAGITVKSGIEDFSIIPFEQEAGI

SEQ ID NO: 723 - protein, 174 aa, Escherichia coli
MAKSAKRIRNAAATYVPQSRDAVVCDIRRIGDLQREAARLETEMNDAIAEITEKYASQIAPLKTSIETLSKGIQGWCEANRDELTNGGKVKTANLVTGDVSWRQRPPSVSIRGVDAVMETLERLGLQRFIRTKQEINKEAILLEPKAVAGVAGITVKSGIEDFSIIPFEQEAGI

SEQ ID NO: 724 - protein, 174 aa, Salmonella enterica
MAKSAKRIKSAAATYVPQSRDAVVCDIRRIGDLQREAARLETEMNDAIAEITEKYASQIAPLKTSIETLSKGVQGWCEANRDELTNGGKVKSANLVTGDVQWRQRPPSVSIRGVDAVMETLERLGLQRFIRTKQEINKEAILLEPKAVAGVAGITVKSGIEDFSIIPFEQEAGI

SEQ ID NO: 725 - protein, 174 aa, Shigella sonnei
MAKSAKRIRNAAAAYVPQSRDAVVCDIRRIGNLQREAARLETEMNDAIAEITEKYASQIAPLKTSIETLSKGVQGWCEANRDELTNGGKVKTANLVTGDVSWRQRPPSVSIRGVDAVMETLERLGLQRFIRTKQEINKEAILLEPKAVAGVAGITVKSGIEDFSIIPFEQDAGI

SEQ ID NO: 726 - protein, 165 aa, Shigella flexneri
MVVSAIASTPHDAVVCDIRRIGDLQREAARLETEMNDAIAEITEKDASQIAPLKTSIETLSKGVQGWCEANRDELTNGGKVKTANLVTGDVSWRQRPPSVSIRGVDAVMETLERLGLQRFIRTKQEINKEAILLEPKAVAGVAGITVKSGIEDFSIIPFEQEAGI

SEQ ID NO: 727 - protein, 174 aa, Kluyvera georgiana
MVSKPKRIKAAAANYVSQSRDAVITDIRKIGDLQREATRLESAMNDEIAVITEKYAGLIKPLKADVEMLSKGVQGWCEANRDDLTSNGKVKTANLVTGDIQWRIRPPSVSVRGPDAVMETLTRLGLSRFIRTKQEINKEAILNEPLAVAGVAGITVKSGIEDFSIIPFEQTADI

SEQ ID NO: 728 - protein, 174 aa, Edwardsiella tarda
MASKPKRIKSAAANYVSQSRDAVIIDIRKIGDLQREATRLESAMNDEIAVITEKYAGLIKPLKADVEMLSKGVQGWCEANRDELTCNGKVKTANLVTGDIQWRIRPPSVSVRGPDSVMETLLRLGLSRFIRTKQEINKEAILNEPLAVAGVAGITVKTGVEDFSIIPFEQTADI

SEQ ID NO: 729 - protein, 174 aa, Citrobacter freundii
MVSKPKRIKAAAANYVSQSKEAVIADIRKIGDLQREATRLESAMNDEIAVITEKYAGLIKPLKTDVEILSKGVQGWCEANRDELTSNGKVKTANLVTGDIQWRIRPPSVAVRGPDAVMETLLRLGLSRFIRTKQEINKEAILNEPLAVAGVAGITVKSGVEDFSIIPFEQTADI

SEQ ID NO: 730 - protein, 174 aa, Salmonella enterica
MASKPKRIKAAAALYVSQSREDVVRDIRMIGDFQREIVRLETEMNDQIAAVTLKYADKIKPLQEQLKTLSEGVQNWCEANRSDLTNGGKVKTANLVTGDVQWRVRPPSVTVRGVDSVMETLRRLGLSRFIRIKEEINKEAILNEPGAVAGVAGITVKSGVEDFSIIPFEQSATN

SEQ ID NO: 731 - protein, 172 aa, Pasteurella multocida
MAKKATRIKTTAQVYVPQSREDVASDIKTIGDLNREITRLETEMNDKIAEITESYKGQFSPIQERIKNLSTGVQFWAEANRDQITNGGKTKTANLITGEVSWRVRNPSVKITGVDSVLQNLKIHGLTKFIRVKEEINKEAILNEKHEVAGIAGIKVVSGVEDFVITPFEQEI

SEQ ID NO: 732 - protein, 173 aa, Aggregatibacter actinomycetemcomitans
MAKSATRVKATAQIYVPQTREDAAGDIKTIGDLNREVARLEAEMNDKIAAITEDYKDKFAPLQERIKTLSNGVQYWSEANRDQITNGGKTKTANLVTGEVSWRVRNPSVKVTGVDSVLQNLRIHGLERFIRTKEEINKEAILNEKSAVAGIAGIKVITGVEDFVITPFEQEAA

SEQ ID NO: 733 - protein, 173 aa, Nitrosomonas halophila
MARNAARLKTKSIAYVPQSRDDAAADIRKIGDLQRQLTRTSTEMNDAIAAITQNFQPRMDAIKEQINLLQAGVQGYCEAHRHALTDNGRVKTANLITGEVQWRQRPPSVSIRGQQVVLETLRRLGLERFIRTKEEVNKEAILNEPDEVRGVAGLNVITGVEDFVITPFEQEQP

SEQ ID NO: 734 - protein, 172 aa, Staphylococcus aureus
MAKKRIKAAATVYVPQSKEEVQNDIREIGDISRKNERLETEMNDRIAEITNEYAPKFEVNKVRLELLTKGVQSWCEANRDDLTNSGKVKSANLVTGKVEWRQRPPSISVKGMDAVIEWLQDSKYQRFLRTKVEVNKEAMLNEPEDAKTIPGITIKSGIEDFAITPFEQEAGV

SEQ ID NO: 735 - DNA, 21 bp, synthetic construct
  misc_feature 1..21: note = Synthetic Polynucleotide
  source 1..21: mol_type = other DNA
tacagtcagtatcaattctgg

SEQ ID NO: 736 - skipped

SEQ ID NO: 737 - protein, 7 aa, synthetic construct
  REGION 1..7: note = Synthetic Polypeptide
KKTGDQK

SEQ ID NO: 738 - DNA, 32 bp, synthetic construct
  misc_feature 1..32: note = Synthetic Polynucleotide
  source 1..32: mol_type = other DNA
ttccatacagtcagtatcaattctggaagaat

SEQ ID NO: 739 - DNA, 42 bp, synthetic construct
  misc_feature 1..42: note = Synthetic Polynucleotide
  source 1..42: mol_type = other DNA
tacagtcagtatcaattctggaagaatttccagacattaaag

SEQ ID NO: 740 - protein, 14 aa, synthetic construct
  REGION 1..14: note = Synthetic Polypeptide
YSQYQFWKNFQTLK

SEQ ID NO: 741 - DNA, 42 bp, synthetic construct
  misc_feature 1..42: note = Synthetic Polynucleotide
  source 1..42: mol_type = other DNA
ctttaatgtctggaaattcttccagaattgatactgactgta
